United States Patent Application Publication US 2026/0209739 A1 - sequence listing, part 5

SEQ ID NO: 74402 - RNA, 33 nt, synthetic construct
  misc_feature 1..33: note = Protein S100-A1 (32-42)
  source 1..33: mol_type = other RNA
aaggagctgaaagaactccttcagaccgagctg

SEQ ID NO: 74403 - RNA, 27 nt, synthetic construct
  misc_feature 1..27: note = L-dopachrome tautomerase (418-426)
  source 1..27: mol_type = other RNA
aaggagctgcccagcctccacgtgctt

SEQ ID NO: 74404 - RNA, 30 nt, synthetic construct
  misc_feature 1..30: note = Loss of heterozygosity 12 chromosomal region 1 protein (119-128)
  source 1..30: mol_type = other RNA
aaggagatggacctgagcgtggaaaccctc

SEQ ID NO: 74405 - RNA, 27 nt, synthetic construct
  misc_feature 1..27: note = Disabled homolog 2 (652-660)
  source 1..27: mol_type = other RNA
aaggagatgttcaaagactttcagctg

SEQ ID NO: 74406 - RNA, 36 nt, synthetic construct; identical to SEQ ID NO: 50179
  misc_feature 1..36: note = T-complex protein 1 subunit epsilon (113-124)
  source 1..36: mol_type = other RNA

SEQ ID NO: 74407 - RNA, 33 nt, synthetic construct
  misc_feature 1..33: note = Ras-related protein Rab-13 (99-109)
  source 1..33: mol_type = other RNA
aaggagaacgccagcgctggcgtggaaagactg

SEQ ID NO: 74408 - RNA, 30 nt, synthetic construct; identical to SEQ ID NO: 50181
  misc_feature 1..30: note = Ras-related protein Rab-34 (152-161)
  source 1..30: mol_type = other RNA

SEQ ID NO: 74409 - RNA, 30 nt, synthetic construct
  misc_feature 1..30: note = AN1-type zinc finger protein 5 (200-209)
  source 1..30: mol_type = other RNA
aaggagaaccccgtggtcgttgccgaaaaa

SEQ ID NO: 74410 - RNA, 27 nt, synthetic construct
  misc_feature 1..27: note = Hypoxia-inducible factor 1-alpha (392-400)
  source 1..27: mol_type = other RNA
aaggagcccgacgccctgaccctcctt

SEQ ID NO: 74411 - RNA, 27 nt, synthetic construct
  misc_feature 1..27: note = P protein (539-547)
  source 1..27: mol_type = other RNA
aaggagcccagcgaaatcgtggagctg

SEQ ID NO: 74412 - RNA, 33 nt, synthetic construct
  misc_feature 1..33: note = Zinc finger protein 36, C3H1 type-like 2 (102-112)
  source 1..33: mol_type = other RNA
aaggagcccagcggcgggggaggtaccgccctg

SEQ ID NO: 74413 - RNA, 27 nt, synthetic construct
  misc_feature 1..27: note = V-type proton ATPase subunit H (86-94)
  source 1..27: mol_type = other RNA
aaggagcagaccgtgcaatacatcctg

SEQ ID NO: 74414 - RNA, 33 nt, synthetic construct
  misc_feature 1..33: note = Filamin A-interacting protein 1-like (562-572)
  source 1..33: mol_type = other RNA
aaggagagagacgatctgaaaaacaagctcaaa

SEQ ID NO: 74415 - RNA, 30 nt, synthetic construct
  misc_feature 1..30: note = Transcription factor 7-like 2 (348-357)
  source 1..30: mol_type = other RNA
aaggagagcgccgctatcaaccagattctg

SEQ ID NO: 74416 - RNA, 27 nt, synthetic construct
  misc_feature 1..27: note = Dynactin subunit 2 (127-135)
  source 1..27: mol_type = other RNA
aaggagagcgccaccgaagagaaactg

SEQ ID NO: 74417 - RNA, 27 nt, synthetic construct
  misc_feature 1..27: note = Cullin-1 (229-237)
  source 1..27: mol_type = other RNA
aaggagagcttcgaatcccagtttctg

SEQ ID NO: 74418 - RNA, 30 nt, synthetic construct
  misc_feature 1..30: note = Lysine-specific histone demethylase 1B (522-531)
  source 1..30: mol_type = other RNA
aaggagagcggcatccagttctccgaactg

SEQ ID NO: 74419 - RNA, 27 nt, synthetic construct
  misc_feature 1..27: note = Ras-related GTP-binding protein D (313-321)
  source 1..27: mol_type = other RNA
aaggagagcaccgccatcattaaactg

SEQ ID NO: 74420 - RNA, 27 nt, synthetic construct
  misc_feature 1..27: note = Ras-related protein Rab-7a (48-56)
  source 1..27: mol_type = other RNA
aaggaggtgatggtcgacgatagactg

SEQ ID NO: 74421 - RNA, 27 nt, synthetic construct
  misc_feature 1..27: note = Cold shock domain-containing protein E1 (675-683)
  source 1..27: mol_type = other RNA
aaggaggtgcaggacggcatcgaactg

SEQ ID NO: 74422 - RNA, 24 nt, synthetic construct
  misc_feature 1..24: note = Band 4.1-like protein 2 (195-202)
  source 1..24: mol_type = other RNA
aaggaggtgcagaccaacgaactg

SEQ ID NO: 74423 - RNA, 27 nt, synthetic construct
  misc_feature 1..27: note = Nuclear receptor subfamily 4 group A member 3 (320-328)
  source 1..27: mol_type = other RNA
aaggaggtggtcagaaccgacagcctg

SEQ ID NO: 74424 - RNA, 33 nt, synthetic construct
  misc_feature 1..33: note = RuvB-like 1 (68-78)
  source 1..33: mol_type = other RNA
aaggaggtgtacgaaggcgaggtcaccgaactg

SEQ ID NO: 74425 - RNA, 27 nt, synthetic construct
  misc_feature 1..27: note = F-box only protein 32 (43-51)
  source 1..27: mol_type = other RNA
aaggaggtgtacaacaaagaaaatctg

SEQ ID NO: 74426 - RNA, 27 nt, synthetic construct
  misc_feature 1..27: note = Armadillo repeat-containing X-linked protein 1 (379-387)
  source 1..27: mol_type = other RNA
aaggagtgggacagagaaatcctgctc

SEQ ID NO: 74427 - RNA, 27 nt, synthetic construct
  misc_feature 1..27: note = Sentrin-specific protease 6 (154-162)
  source 1..27: mol_type = other RNA
aaggagtacccccctcacgtgcagaaa

SEQ ID NO: 74428 - RNA, 33 nt, synthetic construct
  misc_feature 1..33: note = Iron-responsive element-binding protein 2 (24-34)
  source 1..33: mol_type = other RNA
aagttctttgacgtgagcaaactgggcaccaag

SEQ ID NO: 74429 - RNA, 27 nt, synthetic construct
  misc_feature 1..27: note = Nucleolin (110-118)
  source 1..27: mol_type = other RNA
aagggcgccacccccgggaaagctctg

SEQ ID NO: 74430 - RNA, 27 nt, synthetic construct
  misc_feature 1..27: note = PRELI domain-containing protein 1, mitochondrial (160-168)
  source 1..27: mol_type = other RNA
aagggcttcgagtacatcctggccaaa

SEQ ID NO: 74431 - RNA, 30 nt, synthetic construct
  misc_feature 1..30: note = CD302 antigen (84-93)
  source 1..30: mol_type = other RNA
aagggccccgacgatatcctgctcgggatg

SEQ ID NO: 74432 - RNA, 27 nt, synthetic construct
  misc_feature 1..27: note = Epithelial discoidin domain-containing receptor 1 (781-789)
  source 1..27: mol_type = other RNA
aagatcgccgacttcggcatgagcaga

SEQ ID NO: 74433 - RNA, 33 nt, synthetic construct; identical to SEQ ID NO: 50206
  misc_feature 1..33: note = Merlin (209-219)
  source 1..33: mol_type = other RNA

SEQ ID NO: 74434 - RNA, 27 nt, synthetic construct
  misc_feature 1..27: note = Afadin (742-750)
  source 1..27: mol_type = other RNA
aagatcgacgatgtgctgcacaccctc

SEQ ID NO: 74435 - RNA, 27 nt, synthetic construct
  misc_feature 1..27: note = Leucine-rich repeat-containing protein 9 (112-120)
  source 1..27: mol_type = other RNA
aagatcgagaacctggaaaaactcatt

SEQ ID NO: 74436 - RNA, 27 nt, synthetic construct
  misc_feature 1..27: note = Gamma-interferon-inducible protein 16 (67-75)
  source 1..27: mol_type = other RNA
aagatcttcgaggacattcccaccctg

SEQ ID NO: 74437 - RNA, 30 nt, synthetic construct
  misc_feature 1..30: note = Palladin (13-22)
  source 1..30: mol_type = other RNA
aagatcttcgagggcatgcccgtgaccttt

SEQ ID NO: 74438 - RNA, 30 nt, synthetic construct
  misc_feature 1..30: note = Cytochrome c oxidase subunit 2 (217-226)
  source 1..30: mol_type = other RNA
aagatcttcgagatgggccccgtgtttacc

SEQ ID NO: 74439 - RNA, 27 nt, synthetic construct
  misc_feature 1..27: note = Small subunit processome component 20 homolog (391-399)
  source 1..27: mol_type = other RNA
aagatcttcgagagcagatttgaaaaa

SEQ ID NO: 74440 - RNA, 33 nt, synthetic construct
  misc_feature 1..33: note = Zinc finger protein 141 (290-300)
  source 1..33: mol_type = other RNA
aagatcttcaccagctcctctaactttgccaaa

SEQ ID NO: 74441 - RNA, 27 nt, synthetic construct
  misc_feature 1..27: note = Tudor domain-containing protein 3 (524-532)
  source 1..27: mol_type = other RNA
aagatcttctacaacagcggccccaaa

SEQ ID NO: 74442 - RNA, 27 nt, synthetic construct
  misc_feature 1..27: note = Cytoskeleton-associated protein 5 (868-876)
  source 1..27: mol_type = other RNA
aagatcggcgacaaaaactggaagatt

SEQ ID NO: 74443 - RNA, 27 nt, synthetic construct
  misc_feature 1..27: note = Neuron navigator 2 (2313-2321)
  source 1..27: mol_type = other RNA
aagatcattgactggatacccaaagtg

SEQ ID NO: 74444 - RNA, 36 nt, synthetic construct
  misc_feature 1..36: note = RanBP2-like and GRIP domain-containing protein 3 (721-732)
  source 1..36: mol_type = other RNA
aagatcctggacgatagcgactccaacctctctgtg

SEQ ID NO: 74445 - RNA, 30 nt, synthetic construct
  misc_feature 1..30: note = Creatine kinase S-type, mitochondrial (344-353)
  source 1..30: mol_type = other RNA
aagatcctggagaacctcagacttcagaaa

SEQ ID NO: 74446 - RNA, 27 nt, synthetic construct
  misc_feature 1..27: note = Ankyrin repeat and KH domain-containing protein 1 (866-874)
  source 1..27: mol_type = other RNA
aagatcctgaaagagctccagaaggtg

SEQ ID NO: 74447 - RNA, 27 nt, synthetic construct
  misc_feature 1..27: note = Protein phosphatase 1 regulatory subunit 21 (355-363)
  source 1..27: mol_type = other RNA
aagatcctgccctaccagctcaaaaga

SEQ ID NO: 74448 - RNA, 30 nt, synthetic construct
  misc_feature 1..30: note = Cytoglobin (125-134)
  source 1..30: mol_type = other RNA
aagatcctgagcggcgtgattctcgaggtc

SEQ ID NO: 74449 - RNA, 27 nt, synthetic construct
  misc_feature 1..27: note = Trimethylguanosine synthase (510-518)
  source 1..27: mol_type = other RNA
aagatcctgagcaaagtggagaagttc

SEQ ID NO: 74450 - RNA, 33 nt, synthetic construct
  misc_feature 1..33: note = X-ray repair cross-complementing protein 6 (451-461)
  source 1..33: mol_type = other RNA
aagatcatggccacccccgagcaggtgggcaaa

SEQ ID NO: 74451 - RNA, 27 nt, synthetic construct
  misc_feature 1..27: note = Syntaxin-binding protein 1 (13-21)
  source 1..27: mol_type = other RNA
aagatcatgcacgacgtgattaaaaag

SEQ ID NO: 74452 - RNA, 27 nt, synthetic construct
  misc_feature 1..27: note = Protein S100-A10 (54-62)
  source 1..27: mol_type = other RNA
aagatcatgaaagacctggatcagtgc

SEQ ID NO: 74453 - RNA, 27 nt, synthetic construct
  misc_feature 1..27: note = 60S ribosomal protein L26 (28-36)
  source 1..27: mol_type = other RNA
aagatcatgagctcccccctgtctaaa

SEQ ID NO: 74454 - RNA, 27 nt, synthetic construct
  misc_feature 1..27: note = Inversin (350-358)
  source 1..27: mol_type = other RNA
aagatcaaccccaatgtgcaggactac

SEQ ID NO: 74455 - RNA, 33 nt, synthetic construct
  misc_feature 1..33: note = E3 SUMO-protein ligase NSE2 (96-106)
  source 1..33: mol_type = other RNA
aagatccccgacctgaaactccttgtggagaag

SEQ ID NO: 74456 - RNA, 27 nt, synthetic construct
  misc_feature 1..27: note = Arrestin domain-containing protein 4 (273-281)
  source 1..27: mol_type = other RNA
aagatcccccctgtgaccccaagcatt

SEQ ID NO: 74457 - RNA, 27 nt, synthetic construct
  misc_feature 1..27: note = Utrophin (2159-2167)
  source 1..27: mol_type = other RNA
aagatcagcgagtccctgagaaccgtg

SEQ ID NO: 74458 - RNA, 30 nt, synthetic construct
  misc_feature 1..30: note = Nucleolar protein 58 (40-49)
  source 1..30: mol_type = other RNA
aagatcgtgaaactgaagcacttcgagaaa

SEQ ID NO: 74459 - RNA, 36 nt, synthetic construct
  misc_feature 1..36: note = ATP synthase subunit g, mitochondrial (55-66)
  source 1..36: mol_type = other RNA
aagatcgtgaacagcgcccagaccggctccttcaaa

SEQ ID NO: 74460 - RNA, 36 nt, synthetic construct
  misc_feature 1..36: note = Pre-mRNA-processing factor 19 (375-386)
  source 1..36: mol_type = other RNA
aagatctgggacctgaaagagagaaccaacgtggcc

SEQ ID NO: 74461 - RNA, 30 nt, synthetic construct
  misc_feature 1..30: note = Melanoma-associated antigen 12 (220-229)
  source 1..30: mol_type = other RNA
aagatctgggaggaactgagcgtgctcgag

SEQ ID NO: 74462 - RNA, 27 nt, synthetic construct
  misc_feature 1..27: note = 60S ribosomal protein L3 (278-286)
  source 1..27: mol_type = other RNA
aagatctacaaaattggccaggggtat

SEQ ID NO: 74463 - RNA, 33 nt, synthetic construct
  misc_feature 1..33: note = SWI/SNF-related matrix-associated actin-dependent regulator of chromatin subfamily A member 5 (411-421)
  source 1..33: mol_type = other RNA
aagatctacgtgggcctgagcaaaatgcagaga

SEQ ID NO: 74464 - RNA, 27 nt, synthetic construct
  misc_feature 1..27: note = Dynein heavy chain 5, axonemal (1406-1414)
  source 1..27: mol_type = other RNA
aagaaacagctgaacctccttcaaaag

SEQ ID NO: 74465 - RNA, 27 nt, synthetic construct
  misc_feature 1..27: note = Tubulin alpha-1C chain (89-97)
  source 1..27: mol_type = other RNA
aagctggccgaccagtgcaccggcctc

SEQ ID NO: 74466 - RNA, 27 nt, synthetic construct
  misc_feature 1..27: note = Protein TANC1 (1398-1406)
  source 1..27: mol_type = other RNA
aagctgtgccccaccaaccaggaggtg

SEQ ID NO: 74467 - RNA, 30 nt, synthetic construct
  misc_feature 1..30: note = Golgi-associated PDZ and coiled-coil motif-containing protein (449-458)
  source 1..30: mol_type = other RNA
aagctggacgatctccacaccctttaccat

SEQ ID NO: 74468 - RNA, 27 nt, synthetic construct
  misc_feature 1..27: note = Dystonin (4697-4705)
  source 1..27: mol_type = other RNA
aagctggacgatatgctcagcgagctt

SEQ ID NO: 74469 - RNA, 27 nt, synthetic construct
  misc_feature 1..27: note = Prefoldin subunit 3 (21-29)
  source 1..27: mol_type = other RNA
aagctggacgagcagtaccaaaaatat

SEQ ID NO: 74470 - RNA, 30 nt, synthetic construct
  misc_feature 1..30: note = DNA topoisomerase 2-alpha (278-287)
  source 1..30: mol_type = other RNA
aagctggacgagaccggcaacagcctcaaa

SEQ ID NO: 74471 - RNA, 30 nt, synthetic construct
  misc_feature 1..30: note = Cysteine-tRNA ligase, cytoplasmic (716-725)
  source 1..30: mol_type = other RNA
aagctgttcgaggcccaggaaaaactctac

SEQ ID NO: 74472 - RNA, 33 nt, synthetic construct
  misc_feature 1..33: note = Pleckstrin homology-like domain family B member 1 (803-813)
  source 1..33: mol_type = other RNA
aagctgttcgaggacctcgaatttcagcaactt

SEQ ID NO: 74473 - RNA, 27 nt, synthetic construct
  misc_feature 1..27: note = Protein CASP (544-552)
  source 1..27: mol_type = other RNA
aagctgttcgagaaaatcaagtttctc

SEQ ID NO: 74474 - RNA, 30 nt, synthetic construct
  misc_feature 1..30: note = Integrator complex subunit 11 (251-260)
  source 1..30: mol_type = other RNA
aagctgttcatcccctggaccaaccagaaa

SEQ ID NO: 74475 - RNA, 27 nt, synthetic construct
  misc_feature 1..27: note = Lathosterol oxidase (289-297)
  source 1..27: mol_type = other RNA
aagctgttcaacggcgagtttaccaaa

SEQ ID NO: 74476 - RNA, 33 nt, synthetic construct
  misc_feature 1..33: note = Cytochrome c oxidase subunit 7A2, mitochondrial (33-43)
  source 1..33: mol_type = other RNA
aagctgttccaggaggacgatgaaatccccctc

SEQ ID NO: 74477 - RNA, 30 nt, synthetic construct
  misc_feature 1..30: note = Ubiquitin carboxyl-terminal hydrolase 1 (428-437)
  source 1..30: mol_type = other RNA
aagctgttccagggccaactcgtgcttaga

SEQ ID NO: 74478 - RNA, 33 nt, synthetic construct
  misc_feature 1..33: note = Coatomer subunit gamma-1 (75-85)
  source 1..33: mol_type = other RNA
aagctgttccagagcaacgaccccaccctcaga

SEQ ID NO: 74479 - RNA, 24 nt, synthetic construct
  misc_feature 1..24: note = Probable U3 small nucleolar RNA-associated protein 11 (142-149)
  source 1..24: mol_type = other RNA
aagctgttcgtgatcgcccagaaa

SEQ ID NO: 74480 - RNA, 36 nt, synthetic construct
  misc_feature 1..36: note = Thyroid hormone receptor-associated protein 3 (547-558)
  source 1..36: mol_type = other RNA
aagctgggcgccaaaggggacttccccaccggaaag

SEQ ID NO: 74481 - RNA, 27 nt, synthetic construct
  misc_feature 1..27: note = F-box only protein 7 (249-257)
  source 1..27: mol_type = other RNA
aagctgggcgagaacgtggccaatatc

SEQ ID NO: 74482 - RNA, 27 nt, synthetic construct
  misc_feature 1..27: note = Vam6/Vps39-like protein (271-279)
  source 1..27: mol_type = other RNA
aagctgggcaccgaccccacacacgtg

SEQ ID NO: 74483 - RNA, 27 nt, synthetic construct
  misc_feature 1..27: note = Zinc finger protein 106 (287-295)
  source 1..27: mol_type = other RNA
aagctgggcaccgtggccacatacaga

SEQ ID NO: 74484 - RNA, 30 nt, synthetic construct
  misc_feature 1..30: note = Large subunit GTPase 1 homolog (102-111)
  source 1..30: mol_type = other RNA
aagctgcacgaggaaaacaaacagttcctc

SEQ ID NO: 74485 - RNA, 27 nt, synthetic construct
  misc_feature 1..27: note = Serine/threonine-protein kinase RIO2 (60-68)
  source 1..27: mol_type = other RNA
aagctgatcgcctgggagagaaccaaa

SEQ ID NO: 74486 - RNA, 36 nt, synthetic construct
  misc_feature 1..36: note = Inter-alpha-trypsin inhibitor heavy chain H5 (795-806)
  source 1..36: mol_type = other RNA
aagctgatcgacggcgagtacaaagattatctcgcc

SEQ ID NO: 74487 - RNA, 27 nt, synthetic construct
  misc_feature 1..27: note = Elongation of very long chain fatty acids protein 5 (120-128)
  source 1..27: mol_type = other RNA
aagctgatcgagttcatggacaccttt

SEQ ID NO: 74488 - RNA, 27 nt, synthetic construct
  misc_feature 1..27: note = Transcription factor E2F4 (96-104)
  source 1..27: mol_type = other RNA
aagctgatcgagctcaaagccgaaatt

SEQ ID NO: 74489 - RNA, 27 nt, synthetic construct
  misc_feature 1..27: note = Dedicator of cytokinesis protein 9 (1738-1746)
  source 1..27: mol_type = other RNA
aagctgatcattcccatatacgagaaa

SEQ ID NO: 74490 - RNA, 27 nt, synthetic construct
  misc_feature 1..27: note = Amyloid-like protein 2 (10-18)
  source 1..27: mol_type = other RNA
aagctgaaagacctcgccttccttaag

SEQ ID NO: 74491 - RNA, 27 nt, synthetic construct
  misc_feature 1..27: note = Kinesin-like protein KIF20B (1224-1232)
  source 1..27: mol_type = other RNA
aagctgaaagaggaaatcacccagctc

SEQ ID NO: 74492 - RNA, 27 nt, synthetic construct
  misc_feature 1..27: note = Dystonin (2863-2871)
  source 1..27: mol_type = other RNA
aagctgaaagagagcctcgaaaaggcc

SEQ ID NO: 74493 - RNA, 27 nt, synthetic construct
  misc_feature 1..27: note = Heat shock 70 kDa protein 4 (124-132)
  source 1..27: mol_type = other RNA
aagctgaaagagaccgccgaaagcgtg

SEQ ID NO: 74494 - RNA, 27 nt, synthetic construct
  misc_feature 1..27: note = Lon protease homolog 2, peroxisomal (304-312)
  source 1..27: mol_type = other RNA
aagctgaaaaagagagtgctcgagtac

SEQ ID NO: 74495 - RNA, 27 nt, synthetic construct
  misc_feature 1..27: note = Cytoplasmic dynein 1 heavy chain 1 (681-689)
  source 1..27: mol_type = other RNA
aagctgaaacaggacggcgatagcttc

SEQ ID NO: 74496 - RNA, 33 nt, synthetic construct
  misc_feature 1..33: note = E3 ubiquitin-protein ligase UBR3 (1192-1202)
  source 1..33: mol_type = other RNA
aagctgctcgccgagttcgctagcagacagaaa

SEQ ID NO: 74497 - RNA, 30 nt, synthetic construct
  misc_feature 1..30: note = Cytoplasmic dynein 1 heavy chain 1 (1715-1724)
  source 1..30: mol_type = other RNA
aagctgctcgccgagagcgtgaccgaagtc

SEQ ID NO: 74498 - RNA, 27 nt, synthetic construct
  misc_feature 1..27: note = WD repeat and HMG-box DNA-binding protein 1 (77-85)
  source 1..27: mol_type = other RNA
aagctgctcgccatccccgtggagaaa

SEQ ID NO: 74499 - RNA, 36 nt, synthetic construct
  misc_feature 1..36: note = Tight junction-associated protein 1 (150-161)
  source 1..36: mol_type = other RNA
aagctgctcgacgccaaaaacaccatcaataagctt

SEQ ID NO: 74500 - RNA, 30 nt, synthetic construct
  misc_feature 1..30: note = Protein FAM32A (36-45)
  source 1..30: mol_type = other RNA
aagctgctcgaggccatgggcaccagcaaa

SEQ ID NO: 74501 - RNA, 30 nt, synthetic construct
  misc_feature 1..30: note = SEC14 domain and spectrin repeat-containing protein 1 (418-427)
  source 1..30: mol_type = other RNA
aagctgctcgaggaaaaacttaagagcgtg

SEQ ID NO: 74502 - RNA, 27 nt, synthetic construct
  misc_feature 1..27: note = Probable dimethyladenosine transferase (73-81)
  source 1..27: mol_type = other RNA
aagctgctcgagaaagccaagaaagtg

SEQ ID NO: 74503 - RNA, 27 nt, synthetic construct
  misc_feature 1..27: note = Polymerase I and transcript release factor (109-117)
  source 1..27: mol_type = other RNA
aagctgctcgagaaagtgagaaaggtc

SEQ ID NO: 74504 - RNA, 27 nt, synthetic construct
  misc_feature 1..27: note = Retinaldehyde-binding protein 1 (261-269)
  source 1..27: mol_type = other RNA
aagctgctcgagagagtgttcgtccac

SEQ ID NO: 74505 - RNA, 27 nt, synthetic construct
  misc_feature 1..27: note = Ubiquitin-conjugating enzyme E2 Q1 (46-54)
  source 1..27: mol_type = other RNA
aagctgctcgagagcatcttccacaga

SEQ ID NO: 74506 - RNA, 27 nt, synthetic construct
  misc_feature 1..27: note = S-adenosylmethionine decarboxylase proenzyme (12-20)
  source 1..27: mol_type = other RNA
aagctgctcgaggtgtggttcagcaga

SEQ ID NO: 74507 - RNA, 30 nt, synthetic construct
  misc_feature 1..30: note = General transcription factor 3C polypeptide 1 (82-91)
  source 1..30: mol_type = other RNA
aagctgctcaaagagttcaagagaaacgac

SEQ ID NO: 74508 - RNA, 30 nt, synthetic construct
  misc_feature 1..30: note = Enhancer of mRNA-decapping protein 4 (1087-1096)
  source 1..30: mol_type = other RNA
aagctgctcaaaagcaagaaccttaccgac

SEQ ID NO: 74509 - RNA, 36 nt, synthetic construct
  misc_feature 1..36: note = Growth arrest and DNA damage-inducible protein GADD45 alpha (45-56)
  source 1..36: mol_type = other RNA
aagctgctcaacgtggaccccgataatgtcgttctt

SEQ ID NO: 74510 - RNA, 30 nt, synthetic construct
  misc_feature 1..30: note = Box C/D snoRNA protein 1 (321-330)
  source 1..30: mol_type = other RNA
aagctgctccccaacggcttcaccaaaaga

SEQ ID NO: 74511 - RNA, 27 nt, synthetic construct
  misc_feature 1..27: note = HMG box-containing protein 1 (263-271)
  source 1..27: mol_type = other RNA
aagctgctcagccacgaggaatccgtg

SEQ ID NO: 74512 - RNA, 36 nt, synthetic construct
  misc_feature 1..36: note = Ubiquitin-conjugating enzyme E2 E1 (43-54)
  source 1..36: mol_type = other RNA
aagctgctcagcacctccgccaaaagaatccagaag

SEQ ID NO: 74513 - RNA, 33 nt, synthetic construct
  misc_feature 1..33: note = Junction plakoglobin (325-335)
  source 1..33: mol_type = other RNA
aagctgctctggaccacaagcagagtgcttaaa

SEQ ID NO: 74514 - RNA, 27 nt, synthetic construct
  misc_feature 1..27: note = Mitogen-activated protein kinase 6 (549-557)
  source 1..27: mol_type = other RNA
aagctgaacgacctcaatagctccgtg

SEQ ID NO: 74515 - RNA, 27 nt, synthetic construct
  misc_feature 1..27: note = Platelet-activating factor acetylhydrolase IB subunit alpha (71-79)
  source 1..27: mol_type = other RNA
aagctgaacgaggccaaagaagagttc

SEQ ID NO: 74516 - RNA, 27 nt, synthetic construct
  misc_feature 1..27: note = Structural maintenance of chromosomes protein 1A (1009-1017)
  source 1..27: mol_type = other RNA
aagctgaacgagcagcaaagcgtgctc

SEQ ID NO: 74517 - RNA, 33 nt, synthetic construct
  misc_feature 1..33: note = 60S ribosomal protein L4 (327-337)
  source 1..33: mol_type = other RNA
aagctgaacccctacgccaaaaccatgagaagg

SEQ ID NO: 74518 - RNA, 27 nt, synthetic construct
  misc_feature 1..27: note = Pleckstrin homology domain-containing family A member 5 (187-195)
  source 1..27: mol_type = other RNA
aagctgaacagcctcccctccgagtac

SEQ ID NO: 74519 - RNA, 27 nt, synthetic construct
  misc_feature 1..27: note = RUN and FYVE domain-containing protein 2 (250-258)
  source 1..27: mol_type = other RNA
aagctgcaggaggaaaaccaccaactc

SEQ ID NO: 74520 - RNA, 27 nt, synthetic construct
  misc_feature 1..27: note = Bardet-Biedl syndrome 5 protein (242-250)
  source 1..27: mol_type = other RNA
aagctgcaggagagcgtgaaagaaatc

SEQ ID NO: 74521 - RNA, 30 nt, synthetic construct
  misc_feature 1..30: note = Calponin-3 (64-73)
  source 1..30: mol_type = other RNA
aagctgcagcccggcagcgtgaaaaaggtc

SEQ ID NO: 74522 - RNA, 30 nt, synthetic construct; identical to SEQ ID NO: 50295
  misc_feature 1..30: note = AP-1 complex subunit beta-1 (876-885)
  source 1..30: mol_type = other RNA

SEQ ID NO: 74523 - RNA, 27 nt, synthetic construct
  misc_feature 1..27: note = RuvB-like 1 (214-222)
  source 1..27: mol_type = other RNA
aagctgagaggcgagatcaacaaagtg

SEQ ID NO: 74524 - RNA, 30 nt, synthetic construct; identical to SEQ ID NO: 50297
  misc_feature 1..30: note = Integrin beta-1 (331-340)
  source 1..30: mol_type = other RNA

SEQ ID NO: 74525 - RNA, 33 nt, synthetic construct
  misc_feature 1..33: note = 3-hydroxy-3-methylglutaryl-coenzyme A reductase (502-512)
  source 1..33: mol_type = other RNA
aagctgagcgagccctcctctctccagtacctt

SEQ ID NO: 74526 - RNA, 27 nt, synthetic construct
  misc_feature 1..27: note = DNA topoisomerase 1 (248-256)
  source 1..27: mol_type = other RNA
aagctgagccccaaagccgaggaagtg

SEQ ID NO: 74527 - RNA, 30 nt, synthetic construct
  misc_feature 1..30: note = Neuron navigator 2 (616-625)
  source 1..30: mol_type = other RNA
aagctgagctccggcctcccccagcaaaaa

SEQ ID NO: 74528 - RNA, 33 nt, synthetic construct
  misc_feature 1..33: note = Coatomer subunit alpha (619-629)
  source 1..33: mol_type = other RNA
aagctggtgggccagagcatcattgcctacctc

SEQ ID NO: 74529 - RNA, 27 nt, synthetic construct
  misc_feature 1..27: note = Proteasome activator complex subunit 3 (201-209)
  source 1..27: mol_type = other RNA
aagctggtgagcaaaatcgccaagtac

SEQ ID NO: 74530 - RNA, 30 nt, synthetic construct
  misc_feature 1..30: note = Coatomer subunit beta' (124-133)
  source 1..30: mol_type = other RNA
aagctgtgggactgggataaaaagtggagc

SEQ ID NO: 74531 - RNA, 33 nt, synthetic construct; identical to SEQ ID NO: 50304
  misc_feature 1..33: note = Treslin (218-228)
  source 1..33: mol_type = other RNA

SEQ ID NO: 74532 - RNA, 30 nt, synthetic construct
  misc_feature 1..30: note = Lambda-crystallin homolog (33-42)
  source 1..30: mol_type = other RNA
aagctgtacgacatcgagcagcaacagatt

SEQ ID NO: 74533 - RNA, 33 nt, synthetic construct
  misc_feature 1..33: note = 26S proteasome non-ATPase regulatory subunit 11 (325-335)
  source 1..33: mol_type = other RNA
aagctgtacgacaacctccttgagcagaatctg

SEQ ID NO: 74534 - RNA, 27 nt, synthetic construct
  misc_feature 1..27: note = Calpain-1 catalytic subunit (654-662)
  source 1..27: mol_type = other RNA
aagctgtacgagctcatcattaccaga

SEQ ID NO: 74535 - RNA, 30 nt, synthetic construct
  misc_feature 1..30: note = Calpain-1 catalytic subunit (654-663)
  source 1..30: mol_type = other RNA
aagctgtacgagctcatcattaccagatat

SEQ ID NO: 74536 - RNA, 27 nt, synthetic construct
  misc_feature 1..27: note = Signal recognition particle 9 kDa protein (16-24)
  source 1..27: mol_type = other RNA
aagctgtacctcgccgaccccatgaaa

SEQ ID NO: 74537 - RNA, 27 nt, synthetic construct
  misc_feature 1..27: note = Gap junction alpha-3 protein (313-321)
  source 1..27: mol_type = other RNA
aagctgtacaacggccaccatcacctc

SEQ ID NO: 74538 - RNA, 27 nt, synthetic construct
  misc_feature 1..27: note = Dedicator of cytokinesis protein 5 (1299-1307)
  source 1..27: mol_type = other RNA
aagctgtaccaggagatcattagctat

SEQ ID NO: 74539 - RNA, 30 nt, synthetic construct
  misc_feature 1..30: note = Rab GDP dissociation inhibitor beta (130-139)
  source 1..30: mol_type = other RNA
aagctgtacagcgagtccctcgccagatat

SEQ ID NO: 74540 - RNA, 27 nt, synthetic construct
  misc_feature 1..27: note = 2',3'-cyclic-nucleotide 3'-phosphodiesterase (351-359)
  source 1..27: mol_type = other RNA
aagctgtacagcctcggcaacgggaga

SEQ ID NO: 74541 - RNA, 27 nt, synthetic construct
  misc_feature 1..27: note = Cytochrome b-c1 complex subunit 9 (9-17)
  source 1..27: mol_type = other RNA
aagctgtacagcctccttttcagaagg

SEQ ID NO: 74542 - RNA, 30 nt, synthetic construct
  misc_feature 1..30: note = Dual specificity tyrosine-phosphorylation-regulated kinase 3 (365-374)
  source 1..30: mol_type = other RNA
aagctgtacacctatatccagagcagattc

SEQ ID NO: 74543 - RNA, 33 nt, synthetic construct
  misc_feature 1..33: note = Something about silencing protein 10 (134-144)
  source 1..33: mol_type = other RNA
aagctgtactatgacaccgattacggcagcaaa

SEQ ID NO: 74544 - RNA, 27 nt, synthetic construct
  misc_feature 1..27: note = Stathmin (95-103)
  source 1..27: mol_type = other RNA
aagatggccgaggaaaaactgacccac

SEQ ID NO: 74545 - RNA, 33 nt, synthetic construct
  misc_feature 1..33: note = Stathmin (95-105)
  source 1..33: mol_type = other RNA
aagatggccgaggaaaaactgacccacaagatg

SEQ ID NO: 74546 - RNA, 33 nt, synthetic construct
  misc_feature 1..33: note = Eukaryotic peptide chain release factor GTP-binding subunit ERF3B (350-360)
  source 1..33: mol_type = other RNA
aagatggacgatcccaccgtgaactggagcatc

SEQ ID NO: 74547 - RNA, 27 nt, synthetic construct
  misc_feature 1..27: note = Dihydropyrimidinase-related protein 1 (341-349)
  source 1..27: mol_type = other RNA
aagatggacgagaaccagttcgtggcc

SEQ ID NO: 74548 - RNA, 27 nt, synthetic construct
  misc_feature 1..27: note = Interferon regulatory factor 9 (369-377)
  source 1..27: mol_type = other RNA
aagatggagcaggccttcgctagatac

SEQ ID NO: 74549 - RNA, 27 nt, synthetic construct
  misc_feature 1..27: note = Guanine nucleotide-binding protein G(i) subunit alpha-1 (197-205)
  source 1..27: mol_type = other RNA
aagatgttcgacgtgggcgggcagaga

SEQ ID NO: 74550 - RNA, 39 nt, synthetic construct
  misc_feature 1..39: note = Transketolase (516-528)
  source 1..39: mol_type = other RNA
aagatgttcggcatcgacagagatgccattgctcaggca

SEQ ID NO: 74551 - RNA, 33 nt, synthetic construct
  misc_feature 1..33: note = Zinc finger FYVE domain-containing protein 16 (254-264)
  source 1..33: mol_type = other RNA
aagatgttccacgccaaagacaagctgcagcat

SEQ ID NO: 74552 - RNA, 24 nt, synthetic construct
  misc_feature 1..24: note = Ubiquitin-associated domain-containing protein 2 (83-90)
  source 1..24: mol_type = other RNA
aagatgttccaggtgcaccaagtc

SEQ ID NO: 74553 - RNA, 33 nt, synthetic construct
  misc_feature 1..33: note = Intraflagellar transport protein 88 homolog (227-237)
  source 1..33: mol_type = other RNA
aagatgttcagcaacgccggcatcctgaaaatg

SEQ ID NO: 74554 - RNA, 27 nt, synthetic construct
  misc_feature 1..27: note = Integrin alpha-7 (1061-1069)
  source 1..27: mol_type = other RNA
aagatgggcttctttaaaagagccaag

SEQ ID NO: 74555 - RNA, 27 nt, synthetic construct
  misc_feature 1..27: note = FACT complex subunit SPT16 (120-128)
  source 1..27: mol_type = other RNA
aagatgatcgaggccattaaagaaagc

SEQ ID NO: 74556 - RNA, 30 nt, synthetic construct
  misc_feature 1..30: note = BRISC and BRCA1-A complex member 1 (126-135)
  source 1..30: mol_type = other RNA
aagatgatcgagatgttcgtgagaaccaaa

SEQ ID NO: 74557 - RNA, 27 nt, synthetic construct
  misc_feature 1..27: note = Spartin (80-88)
  source 1..27: mol_type = other RNA
aagatgaaagagaccctgcagaacgtg

SEQ ID NO: 74558 - RNA, 30 nt, synthetic construct
  misc_feature 1..30: note = DNA topoisomerase 1 (262-271)
  source 1..30: mol_type = other RNA
aagatgctggaccacgagtacaccacaaaa

SEQ ID NO: 74559 - RNA, 30 nt, synthetic construct
  misc_feature 1..30: note = Tropomodulin-3 (307-316)
  source 1..30: mol_type = other RNA
aagatgctggaggaaaacaccaatatcctc

SEQ ID NO: 74560 - RNA, 30 nt, synthetic construct
  misc_feature 1..30: note = Enhancer of mRNA-decapping protein 3 (373-382)
  source 1..30: mol_type = other RNA
aagatgctggagagcatcaccaacgaactc

SEQ ID NO: 74561 - RNA, 27 nt, synthetic construct
  misc_feature 1..27: note = Transient receptor potential cation channel subfamily M member 2 (1336-1344)
  source 1..27: mol_type = other RNA
aagatgctggaggtgctcgtcgttaaa

SEQ ID NO: 74562 - RNA, 27 nt, synthetic construct
  misc_feature 1..27: note = MICAL-like protein 1 (843-851)
  source 1..27: mol_type = other RNA
aagatgctgaaactccttggcaacaag

SEQ ID NO: 74563 - RNA, 30 nt, synthetic construct
  misc_feature 1..30: note = Cofilin-1 (73-82)
  source 1..30: mol_type = other RNA
aagatgctgcccgacaaagattgcagatac

SEQ ID NO: 74564 - RNA, 33 nt, synthetic construct
  misc_feature 1..33: note = Cofilin-1 (73-83)
  source 1..33: mol_type = other RNA
aagatgctgcccgacaaagattgcagatacgcc

SEQ ID NO: 74565 - RNA, 27 nt, synthetic construct
  misc_feature 1..27: note = Leucine-rich repeat-containing protein 40 (539-547)
  source 1..27: mol_type = other RNA
aagatgatggagaacctgaccacactc

SEQ ID NO: 74566 - RNA, 27 nt, synthetic construct
  misc_feature 1..27: note = U3 small nucleolar ribonucleoprotein protein MPP10 (357-365)
  source 1..27: mol_type = other RNA
aagatgaacgagaaaatcgccagcctg

SEQ ID NO: 74567 - RNA, 27 nt, synthetic construct
  misc_feature 1..27: note = Unconventional myosin-X (643-651)
  source 1..27: mol_type = other RNA
aagatgcccgaccagttcgatcaagcc

SEQ ID NO: 74568 - RNA, 27 nt, synthetic construct
  misc_feature 1..27: note = Voltage-dependent calcium channel subunit alpha-2/delta-1 (39-47)
  source 1..27: mol_type = other RNA
aagatgcaggaggacctggtgaccctc

SEQ ID NO: 74569 - RNA, 36 nt, synthetic construct
  misc_feature 1..36: note = Gamma-secretase C-terminal fragment 59 (620-631)
  source 1..36: mol_type = other RNA
aagatgcagcaaaacggctacgagaatcccacctat

SEQ ID NO: 74570 - RNA, 33 nt, synthetic construct
  misc_feature 1..33: note = U2 small nuclear ribonucleoprotein B'' (47-57)
  source 1..33: mol_type = other RNA
aagatgagaggccaggccttcgtgatctttaaa

SEQ ID NO: 74571 - RNA, 27 nt, synthetic construct
  misc_feature 1..27: note = Aryl hydrocarbon receptor nuclear translocator (104-112)
  source 1..27: mol_type = other RNA
aagatgaccgcctacatcacagagctg

SEQ ID NO: 74572 - RNA, 27 nt, synthetic construct
  misc_feature 1..27: note = Uncharacterized protein C20orf194 (424-432)
  source 1..27: mol_type = other RNA
aagatgaccttccacatccatgccgtg

SEQ ID NO: 74573 - RNA, 27 nt, synthetic construct
  misc_feature 1..27: note = Aryl hydrocarbon receptor nuclear translocator 2 (67-75)
  source 1..27: mol_type = other RNA
aagatgacccagtacatcacagagctg

SEQ ID NO: 74574 - RNA, 27 nt, synthetic construct
  misc_feature 1..27: note = Dual specificity mitogen-activated protein kinase kinase 7 (221-229)
  source 1..27: mol_type = other RNA
aagatgaccgtggccatcgtcaaagct

SEQ ID NO: 74575 - RNA, 36 nt, synthetic construct
  misc_feature 1..36: note = A-kinase anchor protein 11 (898-909)
  source 1..36: mol_type = other RNA
aagatggtggacgagagaaccgattacctgacaaaa

SEQ ID NO: 74576 - RNA, 33 nt, synthetic construct
  misc_feature 1..33: note = 5-demethoxyubiquinone hydroxylase, mitochondrial (1-11)
  source 1..33: mol_type = other RNA
aagatgtgggaccaggagaaagatcacctgaag

SEQ ID NO: 74577 - RNA, 36 nt, synthetic construct
  misc_feature 1..36: note = 5-demethoxyubiquinone hydroxylase, mitochondrial (1-12)
  source 1..36: mol_type = other RNA
aagatgtgggaccaggagaaagatcacctgaagaaa

SEQ ID NO: 74578 - RNA, 45 nt, synthetic construct
  misc_feature 1..45: note = Neuroblast differentiation-associated protein AHNAK (5087-5101)
  source 1..45: mol_type = other RNA
aagatgtacttccccgacgtggagtttgatatcaaaagccctaag

SEQ ID NO: 74579 - RNA, 33 nt, synthetic construct
  misc_feature 1..33: note = General transcription factor 3C polypeptide 3 (166-176)
  source 1..33: mol_type = other RNA
aagatgtacggctatgtggacaccctgctcaca

SEQ ID NO: 74580 - RNA, 30 nt, synthetic construct
  misc_feature 1..30: note = Round spermatid basic protein 1 (272-281)
  source 1..30: mol_type = other RNA
aagatgtacaacaaagaggtgcagaccgtc

SEQ ID NO: 74581 - RNA, 33 nt, synthetic construct
  misc_feature 1..33: note = 116 kDa U5 small nuclear ribonucleoprotein component (480-490)
  source 1..33: mol_type = other RNA
aagatgtacagcaccgacgatggcgtgcagttc

SEQ ID NO: 74582 - RNA, 27 nt, synthetic construct
  misc_feature 1..27: note = 60S ribosomal protein L17 (96-104)
  source 1..27: mol_type = other RNA
aagaacgccgagagcaatgctgaactg

SEQ ID NO: 74583 - RNA, 27 nt, synthetic construct
  misc_feature 1..27: note = Ras GTPase-activating-like protein IQGAP2 (729-737)
  source 1..27: mol_type = other RNA
aagaacgacctgctcagcgagcttctg

SEQ ID NO: 74584 - RNA, 27 nt, synthetic construct
  misc_feature 1..27: note = FACT complex subunit SPT16 (53-61)
  source 1..27: mol_type = other RNA
aagaacttcgacatggtgatcgtctac

SEQ ID NO: 74585 - RNA, 24 nt, synthetic construct
  misc_feature 1..24: note = Glutathione S-transferase theta-2B (23-30)
  source 1..24: mol_type = other RNA
aagaacggcatccccctggagctc

SEQ ID NO: 74586 - RNA, 45 nt, synthetic construct
  misc_feature 1..45: note = Stromal cell-derived factor 2 (197-211)
  source 1..45: mol_type = other RNA
aagcccagcgagctgctcaaagccgaagctcaccatgcagagctt

SEQ ID NO: 74587 - RNA, 36 nt, synthetic construct
  misc_feature 1..36: note = Spectrin beta chain, non-erythrocytic 1 (1179-1190)
  source 1..36: mol_type = other RNA
aagcaggccgaggctttcctgaacaatcaagaatac

SEQ ID NO: 74588 - RNA, 27 nt, synthetic construct
  misc_feature 1..27: note = Melanocyte protein PMEL (629-637)
  source 1..27: mol_type = other RNA
aagcaggacttcagcgtgccccaactg

SEQ ID NO: 74589 - RNA, 24 nt, synthetic construct
  misc_feature 1..24: note = EF-hand calcium-binding domain-containing protein 14 (264-271)
  source 1..24: mol_type = other RNA
aagcaggacatcctgtacctccac

SEQ ID NO: 74590 - RNA, 27 nt, synthetic construct
  misc_feature 1..27: note = Syntaxin-binding protein 6 (78-86)
  source 1..27: mol_type = other RNA
aagcagttcgagggcagcacctccttt

SEQ ID NO: 74591 - RNA, 27 nt, synthetic construct
  misc_feature 1..27: note = E3 ubiquitin-protein ligase makorin-1 (320-328)
  source 1..27: mol_type = other RNA
aagcagttcgagagcaaaatcattaag

SEQ ID NO: 74592 - RNA, 27 nt, synthetic construct
  misc_feature 1..27: note = Nucleoside diphosphate-linked moiety X motif 19 (337-345)
  source 1..27: mol_type = other RNA
aagcagttccacagaatcgtgacctac

SEQ ID NO: 74593 - RNA, 30 nt, synthetic construct
  misc_feature 1..30: note = ADP-ribosylation factor GTPase-activating protein 2 (453-462)
  source 1..30: mol_type = other RNA
aagcagggcgtgaaaagcgtcgccgggaag

SEQ ID NO: 74594 - RNA, 27 nt, synthetic construct
  misc_feature 1..27: note = Lanosterol 14-alpha demethylase (169-177)
  source 1..27: mol_type = other RNA
aagcagcacgtgagcatcattgagaaa

SEQ ID NO: 74595 - RNA, 30 nt, synthetic construct
  misc_feature 1..30: note = 60 kDa SS-A/Ro ribonucleoprotein (14-23)
  source 1..30: mol_type = other RNA
aagcagatcgccaacagccaagacggctac

SEQ ID NO: 74596 - RNA, 27 nt, synthetic construct
  misc_feature 1..27: note = Cytoplasmic dynein 1 heavy chain 1 (3819-3827)
  source 1..27: mol_type = other RNA
aagcagatccacttcctgtaccaatat

SEQ ID NO: 74597 - RNA, 30 nt, synthetic construct
  misc_feature 1..30: note = Catenin alpha-1 (287-296)
  source 1..30: mol_type = other RNA
aagcagatcattgtggaccccctgagcttc

SEQ ID NO: 74598 - RNA, 30 nt, synthetic construct
  misc_feature 1..30: note = Cytoplasmic dynein 1 heavy chain 1 (1464-1473)
  source 1..30: mol_type = other RNA
aagcagatcagagaggtgtggaacacctac

SEQ ID NO: 74599 - RNA, 33 nt, synthetic construct
  misc_feature 1..33: note = Proteasome subunit alpha type-4 (158-168)
  source 1..33: mol_type = other RNA
aagcagaaagaggtggaacaactgatcaagaaa

SEQ ID NO: 74600 - RNA, 33 nt, synthetic construct
  misc_feature 1..33: note = Tyrosinase (505-515)
  source 1..33: mol_type = other RNA
aagcagctgcccgaggaaaaacaacctctcctt

SEQ ID NO: 74601 - RNA, 30 nt, synthetic construct
  misc_feature 1..30: note = Guanine nucleotide-binding protein G(s) subunit alpha isoforms short (28-37)
  source 1..30: mol_type = other RNA
aagcagctgcaaaaagacaagcaggtgtac

SEQ ID NO: 74602 - RNA, 27 nt, synthetic construct
  misc_feature 1..27: note = Small kinetochore-associated protein (228-236)
  source 1..27: mol_type = other RNA
aagcagatggaggaactgcaagccctc

SEQ ID NO: 74603 - RNA, 27 nt, synthetic construct
  misc_feature 1..27: note = DnaJ homolog subfamily C member 4 (151-159)
  source 1..27: mol_type = other RNA
aagcagaacaaacaagtgctgggctac

SEQ ID NO: 74604 - RNA, 27 nt, synthetic construct
  misc_feature 1..27: note = Cytoplasmic dynein 1 heavy chain 1 (3266-3274)
  source 1..27: mol_type = other RNA
aagcagcaagaggtgatcgccgacaaa

SEQ ID NO: 74605 - RNA, 27 nt, synthetic construct
  misc_feature 1..27: note = Pyridoxal kinase (29-37)
  source 1..27: mol_type = other RNA
aagcagcaaaaccccagactggtgtac

SEQ ID NO: 74606 - RNA, 27 nt, synthetic construct
  misc_feature 1..27: note = PRELI domain-containing protein 1, mitochondrial (211-219)
  source 1..27: mol_type = other RNA
aagcagcaacagcagcagcaattcgtg

SEQ ID NO: 74607 - RNA, 27 nt, synthetic construct
  misc_feature 1..27: note = Mitochondrial import receptor subunit TOM7 homolog (9-17)
  source 1..27: mol_type = other RNA
aagcagagactgcaacagctcttcaaa

SEQ ID NO: 74608 - RNA, 27 nt, synthetic construct
  misc_feature 1..27: note = Protein Simiate (164-172)
  source 1..27: mol_type = other RNA
aagcagtacgaggaagtgatggtcaaa

SEQ ID NO: 74609 - RNA, 27 nt, synthetic construct
  misc_feature 1..27: note = 60S ribosomal protein L35a (45-53)
  source 1..27: mol_type = other RNA
aagagatgcgcctacgtgtataaagct

SEQ ID NO: 74610 - RNA, 27 nt, synthetic construct
  misc_feature 1..27: note = Fructose-bisphosphate aldolase A (82-90)
  source 1..27: mol_type = other RNA
aagagatgccagtacgtgaccgagaaa

SEQ ID NO: 74611 - RNA, 27 nt, synthetic construct
  misc_feature 1..27: note = Trafficking kinesin-binding protein 2 (839-847)
  source 1..27: mol_type = other RNA
aagagactgggcatcgccagggtggtc

SEQ ID NO: 74612 - RNA, 27 nt, synthetic construct
  misc_feature 1..27: note = Chitinase domain-containing protein 1 (226-234)
  source 1..27: mol_type = other RNA
aagagagtgggcctgatccacatgctc

SEQ ID NO: 74613 - RNA, 33 nt, synthetic construct
  misc_feature 1..33: note = Myc proto-oncogene protein (324-334)
  source 1..33: mol_type = other RNA
aagagagtgaaactggacagcgtcagggttctc

SEQ ID NO: 74614 - RNA, 27 nt, synthetic construct
  misc_feature 1..27: note = Msx2-interacting protein (27-35)
  source 1..27: mol_type = other RNA
aagagatacggcagggtggagagcgtc

SEQ ID NO: 74615 - RNA, 33 nt, synthetic construct
  misc_feature 1..33: note = DmX-like protein 2 (1150-1160)
  source 1..33: mol_type = other RNA
aagagcgacgccctgctctccaaagatagatac

SEQ ID NO: 74616 - RNA, 33 nt, synthetic construct
  misc_feature 1..33: note = Mitochondrial Rho GTPase 1 (528-538)
  source 1..33: mol_type = other RNA
aagagcgacctgcacgaggtgaaacaggaatac

SEQ ID NO: 74617 - RNA, 42 nt, synthetic construct
  misc_feature 1..42: note = LON peptidase N-terminal domain and RING finger protein 2 (360-373)
  source 1..42: mol_type = other RNA
aagagcgacatgctgggcaacaccaattcctctgtgctctac

SEQ ID NO: 74618 - RNA, 27 nt, synthetic construct
  misc_feature 1..27: note = Transmembrane protein 70, mitochondrial (84-92)
  source 1..27: mol_type = other RNA
aagagcgaggacggcagactgatctac

SEQ ID NO: 74619 - RNA, 33 nt, synthetic construct
  misc_feature 1..33: note = Coiled-coil domain-containing protein 50 (470-480)
  source 1..33: mol_type = other RNA
aagagcgagtcctctcacaaaggcttccattac

SEQ ID NO: 74620 - RNA, 30 nt, synthetic construct
  misc_feature 1..30: note = 26S proteasome non-ATPase regulatory subunit 2 (545-554)
  source 1..30: mol_type = other RNA
aagagcgagaccgaactgaaagacacatac

SEQ ID NO: 74621 - RNA, 24 nt, synthetic construct
  misc_feature 1..24: note = Clathrin heavy chain 1 (706-713)
  source 1..24: mol_type = other RNA
aagagcttcgagggcctgttttac

SEQ ID NO: 74622 - RNA, 27 nt, synthetic construct
  misc_feature 1..27: note = Formin-1 (1326-1334)
  source 1..27: mol_type = other RNA
aagagcttcgagaccacagtgagatac

SEQ ID NO: 74623 - RNA, 27 nt, synthetic construct
  misc_feature 1..27: note = Ubiquitin-like modifier-activating enzyme 6 (628-636)
  source 1..27: mol_type = other RNA
aagagcttccccgccgctatcgagcac

SEQ ID NO: 74624 - RNA, 30 nt, synthetic construct
  misc_feature 1..30: note = Probable cation-transporting ATPase 13A3 (833-842)
  source 1..30: mol_type = other RNA
aagagcttctccgtgatcctggagcacttt

SEQ ID NO: 74625 - RNA, 30 nt, synthetic construct
  misc_feature 1..30: note = Glutamate-rich WD repeat-containing protein 1 (341-350)
  source 1..30: mol_type = other RNA
aagagcggctcccccgtggccaccttcaaa

SEQ ID NO: 74626 - RNA, 33 nt, synthetic construct
  misc_feature 1..33: note = Bifunctional UDP-N-acetylglucosamine 2-epimerase/N-acetylmannosamine kinase (375-385)
  source 1..33: mol_type = other RNA
aagagcatcgacctgcaggagcccctccaaaaa

SEQ ID NO: 74627 - RNA, 27 nt, synthetic construct
  misc_feature 1..27: note = Retinoblastoma-like protein 1 (69-77)
  source 1..27: mol_type = other RNA
aagagcatcattcccaccgtgggcaaa

SEQ ID NO: 74628 - RNA, 30 nt, synthetic construct
  misc_feature 1..30: note = NAD(P)H dehydrogenase (quinone) 1 (259-268)
  source 1..30: mol_type = other RNA
aagagcatccccaccgacaaccagattaaa

SEQ ID NO: 74629 - RNA, 27 nt, synthetic construct
  misc_feature 1..27: note = Small kinetochore-associated protein (70-78)
  source 1..27: mol_type = other RNA
aagagcctgctccccgtgagatccaaa

SEQ ID NO: 74630 - RNA, 33 nt, synthetic construct
  misc_feature 1..33: note = Leucine-rich repeat-containing protein 40 (210-220)
  source 1..33: mol_type = other RNA
aagagcctgcccgccgagatcaacagaatgaaa

SEQ ID NO: 74631 - RNA, 27 nt, synthetic construct
  misc_feature 1..27: note = Putative ATP-dependent RNA helicase DHX57 (635-643)
  source 1..27: mol_type = other RNA
aagagctccgccaccagactgctctac

SEQ ID NO: 74632 - RNA, 27 nt, synthetic construct
  misc_feature 1..27: note = Ankycorbin (402-410)
  source 1..27: mol_type = other RNA
aagagctccccctctgtgctgatccac

SEQ ID NO: 74633 - RNA, 30 nt, synthetic construct
  misc_feature 1..30: note = Alternative protein MKKS (31-40)
  source 1..30: mol_type = other RNA
aagagctcccccgtgttccagatccctaaa

SEQ ID NO: 74634 - RNA, 27 nt, synthetic construct
  misc_feature 1..27: note = ATP synthase F(0) complex subunit C2, mitochondrial (31-39)
  source 1..27: mol_type = other RNA
aagagcacctcccagctgctctctaga

SEQ ID NO: 74635 - RNA, 27 nt, synthetic construct
  misc_feature 1..27: note = Clathrin heavy chain 1 (468-476)
  source 1..27: mol_type = other RNA
aagagcgtggaccccaccctggccctc

SEQ ID NO: 74636 - RNA, 30 nt, synthetic construct
  misc_feature 1..30: note = Programmed cell death 6-interacting protein (574-583)
  source 1..30: mol_type = other RNA
aagagcgtgaacttcgacatgacctccaaa

SEQ ID NO: 74637 - RNA, 33 nt, synthetic construct
  misc_feature 1..33: note = Sodium/potassium-transporting ATPase subunit beta-3 (33-43)
  source 1..33: mol_type = other RNA
aagagctggggctcccagtacgtggtcgggaaa

SEQ ID NO: 74638 - RNA, 27 nt, synthetic construct
  misc_feature 1..27: note = Arf-GAP with SH3 domain, ANK repeat and PH domain-containing protein 1 (73-81)
  source 1..27: mol_type = other RNA
aagaccgccgacaaactgaagcagtac

SEQ ID NO: 74639 - RNA, 30 nt, synthetic construct
  misc_feature 1..30: note = DNA-directed RNA polymerase II subunit RPB1 (853-862)
  source 1..30: mol_type = other RNA
aagaccgccgagacaggctacatccagaga

SEQ ID NO: 74640 - RNA, 30 nt, synthetic construct
  misc_feature 1..30: note = DNA-directed RNA polymerase III subunit RPC1 (133-142)
  source 1..30: mol_type = other RNA
aagaccgccgagacaggctacatgcagaga

SEQ ID NO: 74641 - RNA, 27 nt, synthetic construct
  misc_feature 1..27: note = Chromodomain-helicase-DNA-binding protein 9 (992-1000)
  source 1..27: mol_type = other RNA
aagaccgacgatagcctggagaaatac

SEQ ID NO: 74642 - RNA, 27 nt, synthetic construct
  misc_feature 1..27: note = TBC1 domain family member 15 (379-387)
  source 1..27: mol_type = other RNA
aagaccgacgagtacttcagaatgaaa

SEQ ID NO: 74643 - RNA, 27 nt, synthetic construct
  misc_feature 1..27: note = Elongator complex protein 6 (28-36)
  source 1..27: mol_type = other RNA
aagaccgacggcagcttcctggtgcac

SEQ ID NO: 74644 - RNA, 27 nt, synthetic construct
  misc_feature 1..27: note = PHD finger-like domain-containing protein 5A (95-103)
  source 1..27: mol_type = other RNA
aagaccgacctgttctacgagagaaaa

SEQ ID NO: 74645 - RNA, 30 nt, synthetic construct
  misc_feature 1..30: note = EF-hand calcium-binding domain-containing protein 7 (222-231)
  source 1..30: mol_type = other RNA
aagaccgaccccgagacattcctgaacaaa

SEQ ID NO: 74646 - RNA, 33 nt, synthetic construct
  misc_feature 1..33: note = A-kinase anchor protein 13 (287-297)
  source 1..33: mol_type = other RNA
aagaccgacagcaaatccatcatgagaatgaag

SEQ ID NO: 74647 - RNA, 30 nt, synthetic construct
  misc_feature 1..30: note = Tumor necrosis factor receptor superfamily member 14 (17-26)
  source 1..30: mol_type = other RNA
aagaccgacgtgctgagactcgtcctttac

SEQ ID NO: 74648 - RNA, 27 nt, synthetic construct
  misc_feature 1..27: note = Poly (ADP-ribose) polymerase 14 (1027-1035)
  source 1..27: mol_type = other RNA
aagaccgacgtggtcgttaacagcgtg

SEQ ID NO: 74649 - RNA, 30 nt, synthetic construct
  misc_feature 1..30: note = Uncharacterized protein C19orf43 (137-146)
  source 1..30: mol_type = other RNA
aagaccgaggacgaagtgctgacaagcaaa

SEQ ID NO: 74650 - RNA, 27 nt, synthetic construct
  misc_feature 1..27: note = M-phase phosphoprotein 8 (68-76)
  source 1..27: mol_type = other RNA
aagaccgagggcgggaaagtgctgtac

SEQ ID NO: 74651 - RNA, 33 nt, synthetic construct
  misc_feature 1..33: note = Protein PRR5-ARHGAP8 (76-86)
  source 1..33: mol_type = other RNA
aagaccgagctgggcagcttctttacagaatac

SEQ ID NO: 74652 - RNA, 33 nt, synthetic construct
  misc_feature 1..33: note = Switch-associated protein 70 (282-292)
  source 1..33: mol_type = other RNA
aagaccttcgagatcagcgcctccgacaaaaag

SEQ ID NO: 74653 - RNA, 30 nt, synthetic construct
  misc_feature 1..30: note = Cytoplasmic dynein 1 heavy chain 1 (872-881)
  source 1..30: mol_type = other RNA
aagaccttcagcgagatcctgaacagagtg

SEQ ID NO: 74654 - RNA, 30 nt, synthetic construct
  misc_feature 1..30: note = N-acetylglucosamine-6-sulfatase (191-200)
  source 1..30: mol_type = other RNA
aagaccatcgaccccgagctgctcggcaaa

SEQ ID NO: 74655 - RNA, 33 nt, synthetic construct
  misc_feature 1..33: note = DNA/RNA-binding protein KIN17 (231-241)
  source 1..33: mol_type = other RNA
aagaccatcggcagctccgcctctgtgaaaaga

SEQ ID NO: 74656 - RNA, 33 nt, synthetic construct
  misc_feature 1..33: note = FH2 domain-containing protein 1 (90-100)
  source 1..33: mol_type = other RNA
aagaccatccccgaggaacaggtgagaggcaaa

SEQ ID NO: 74657 - RNA, 27 nt, synthetic construct
  misc_feature 1..27: note = Nck-associated protein 1 (635-643)
  source 1..27: mol_type = other RNA
aagaccatcagccaggccgtgaacaaa

SEQ ID NO: 74658 - RNA, 27 nt, synthetic construct
  misc_feature 1..27: note = Endoplasmic reticulum-Golgi intermediate compartment protein 3 (4-12)
  source 1..27: mol_type = other RNA
aagaccctggaggacttcagagtgaaa

SEQ ID NO: 74659 - RNA, 30 nt, synthetic construct
  misc_feature 1..30: note = Mitochondrial inner membrane protease ATP23 homolog (100-109)
  source 1..30: mol_type = other RNA
aagaccctggagacaaacccctacgtgaaa

SEQ ID NO: 74660 - RNA, 36 nt, synthetic construct
  misc_feature 1..36: note = cAMP-dependent protein kinase type I-alpha regulatory subunit (123-134)
  source 1..36: mol_type = other RNA
aagaccatggccgctctggcaaaagccatcgagaag

SEQ ID NO: 74661 - RNA, 30 nt, synthetic construct
  misc_feature 1..30: note = Arfaptin-2 (216-225)
  source 1..30: mol_type = other RNA
aagaccatggaggacacactgatgactgtg

SEQ ID NO: 74662 - RNA, 33 nt, synthetic construct
  misc_feature 1..33: note = Telomere-associated protein RIF1 (1915-1925)
  source 1..33: mol_type = other RNA
aagaccatggagctgaacgtgggcaatgaagcc

SEQ ID NO: 74663 - RNA, 33 nt, synthetic construct
  misc_feature 1..33: note = Protein GREB1 (304-314)
  source 1..33: mol_type = other RNA
aagaccatgacaagcactgagcagtccctgtac

SEQ ID NO: 74664 - RNA, 36 nt, synthetic construct
  misc_feature 1..36: note = Protein GREB1 (304-315)
  source 1..36: mol_type = other RNA
aagaccatgacaagcactgagcagtccctgtactat

SEQ ID NO: 74665 - RNA, 27 nt, synthetic construct
  misc_feature 1..27: note = U3 small nucleolar RNA-associated protein 18 homolog (120-128)
  source 1..27: mol_type = other RNA
aagaccaaccccaaaatccagagcatt

SEQ ID NO: 74666 - RNA, 27 nt, synthetic construct
  misc_feature 1..27: note = Huntingtin-interacting protein 1-related protein (29-37)
  source 1..27: mol_type = other RNA
aagacccaggccatcagcatttccaaa

SEQ ID NO: 74667 - RNA, 27 nt, synthetic construct
  misc_feature 1..27: note = Proteasome subunit alpha type-1 (121-129)
  source 1..27: mol_type = other RNA
aagacccagatccccacacaaagatac

SEQ ID NO: 74668 - RNA, 27 nt, synthetic construct
  misc_feature 1..27: note = F-box only protein 32 (74-82)
  source 1..27: mol_type = other RNA
aagacccagtacttccaccaagagaaa

SEQ ID NO: 74669 - RNA, 33 nt, synthetic construct
  misc_feature 1..33: note = Oxysterol-binding protein-related protein 1 (153-163)
  source 1..33: mol_type = other RNA
aagaccacagagctgactgccctccttaacaga

SEQ ID NO: 74670 - RNA, 33 nt, synthetic construct
  misc_feature 1..33: note = G patch domain and KOW motifs-containing protein (49-59)
  source 1..33: mol_type = other RNA
aagaccgtggagggcagagaactgcagagcgtc

SEQ ID NO: 74671 - RNA, 27 nt, synthetic construct
  misc_feature 1..27: note = Melanocyte protein PMEL (154-162)
  source 1..27: mol_type = other RNA
aagacctgggaccaggtgcccttcagc

SEQ ID NO: 74672 - RNA, 36 nt, synthetic construct
  misc_feature 1..36: note = Melanocyte protein PMEL (154-165)
  source 1..36: mol_type = other RNA
aagacctgggaccaggtgcccttcagcgtctccgtt

SEQ ID NO: 74673 - RNA, 24 nt, synthetic construct
  misc_feature 1..24: note = Melanocyte protein PMEL (154-161)
  source 1..24: mol_type = other RNA
aagacctggggccagtactggcaa

SEQ ID NO: 74674 - RNA, 27 nt, synthetic construct
  misc_feature 1..27: note = UDP-glucose 4-epimerase (176-184)
  source 1..27: mol_type = other RNA
aagacctggaacgccgtgctgctcaga

SEQ ID NO: 74675 - RNA, 30 nt, synthetic construct
  misc_feature 1..30: note = UDP-glucose 4-epimerase (176-185)
  source 1..30: mol_type = other RNA
aagacctggaacgccgtgctgctcagatac

SEQ ID NO: 74676 - RNA, 27 nt, synthetic construct
  misc_feature 1..27: note = Transcription factor IIIA (198-206)
  source 1..27: mol_type = other RNA
aagacctggacagagctgctcaaacac

SEQ ID NO: 74677 - RNA, 33 nt, synthetic construct
  misc_feature 1..33: note = A-kinase anchor protein 8-like (264-274)
  source 1..33: mol_type = other RNA
aagacctggacaactgccgacttcagaacgaaa

SEQ ID NO: 74678 - RNA, 33 nt, synthetic construct
  misc_feature 1..33: note = Nuclear pore complex protein Nup107 (574-584)
  source 1..33: mol_type = other RNA
aagacctacatccagctgctcattagagagaaa

SEQ ID NO: 74679 - RNA, 27 nt, synthetic construct
  misc_feature 1..27: note = Poly(A)-specific ribonuclease PARN-like domain-containing protein 1 (364-372)
  source 1..27: mol_type = other RNA
aaggtggcccacctgctccttcagaaa

SEQ ID NO: 74680 - RNA, 33 nt, synthetic construct
  misc_feature 1..33: note = Mesoderm development candidate 1 (236-246)
  source 1..33: mol_type = other RNA
aaggtggcccccagcgagctggctagatccagg

SEQ ID NO: 74681 - RNA, 33 nt, synthetic construct
  misc_feature 1..33: note = Calponin-3 (251-261)
  source 1..33: mol_type = other RNA
aaggtggccagccagaaaggcatgtccgtctac

SEQ ID NO: 74682 - RNA, 27 nt, synthetic construct
  misc_feature 1..27: note = Trafficking protein particle complex subunit 11 (134-142)
  source 1..27: mol_type = other RNA
aaggtggccgtcgttctgatccagaaa

SEQ ID NO: 74683 - RNA, 27 nt, synthetic construct
  misc_feature 1..27: note = Poly(A) polymerase gamma (590-598)
  source 1..27: mol_type = other RNA
aaggtggacagcaccgtcaaaacagtt

SEQ ID NO: 74684 - RNA, 36 nt, synthetic construct
  misc_feature 1..36: note = Actin-related protein 2/3 complex subunit 3 (147-158)
  source 1..36: mol_type = other RNA
aaggtgttcgacccccagaacgataaacctagcaag

SEQ ID NO: 74685 - RNA, 36 nt, synthetic construct
  misc_feature 1..36: note = Myosin regulatory light chain 10 (142-153)
  source 1..36: mol_type = other RNA
aaggtgttcgacaccgagggcaaagggtttgtcaag

SEQ ID NO: 74686 - RNA, 27 nt, synthetic construct
  misc_feature 1..27: note = AP-2 complex subunit mu (405-413)
  source 1..27: mol_type = other RNA
aaggtgttcgagcccaaactgaactac

SEQ ID NO: 74687 - RNA, 27 nt, synthetic construct
  misc_feature 1..27: note = Lysine-specific histone demethylase 1A (228-236)
  source 1..27: mol_type = other RNA
aaggtgttcctgtttatcagaaacagg

SEQ ID NO: 74688 - RNA, 27 nt, synthetic construct
  misc_feature 1..27: note = Serine/threonine-protein phosphatase 2A activator (141-149)
  source 1..27: mol_type = other RNA
aaggtgttcaacagatacctggaggtc

SEQ ID NO: 74689 - RNA, 27 nt, synthetic construct
  misc_feature 1..27: note = Long-chain-fatty-acid-CoA ligase 3 (90-98)
  source 1..27: mol_type = other RNA
aaggtgttcacctacgccaaaaacaag

SEQ ID NO: 74690 - RNA, 27 nt, synthetic construct
  misc_feature 1..27: note = Caspase-2 (77-85)
  source 1..27: mol_type = other RNA
aaggtgggcagcttctcccagaacgtc

SEQ ID NO: 74691 - RNA, 27 nt, synthetic construct
  misc_feature 1..27: note = Syntaxin-binding protein 1 (125-133)
  source 1..27: mol_type = other RNA
aaggtgatcaaaaccctgacagagatt

SEQ ID NO: 74692 - RNA, 33 nt, synthetic construct
  misc_feature 1..33: note = Zinc finger protein 721 (244-254)
  source 1..33: mol_type = other RNA
aaggtgatcagctcctcttcaagtttcgccaaa

SEQ ID NO: 74693 - RNA, 30 nt, synthetic construct
  misc_feature 1..30: note = Protein kinase C delta type (353-362)
  source 1..30: mol_type = other RNA
aaggtgctgggcaaagggagcttcggaaag

SEQ ID NO: 74694 - RNA, 36 nt, synthetic construct
  misc_feature 1..36: note = Inositol 1,4,5-trisphosphate receptor type 1 (451-462)
  source 1..36: mol_type = other RNA
aaggtgctgggcagcatcgccgggaaactcgagaag

SEQ ID NO: 74695 - RNA, 33 nt, synthetic construct
  misc_feature 1..33: note = Nuclease-sensitive element-binding protein 1 (58-68)
  source 1..33: mol_type = other RNA
aaggtgctgggcaccgtcaaatggttcaacgtt

SEQ ID NO: 74696 - RNA, 27 nt, synthetic construct
  misc_feature 1..27: note = SLIT-ROBO Rho GTPase-activating protein 1 (156-164)
  source 1..27: mol_type = other RNA
aaggtgctgaacgagctctacaccgtc

SEQ ID NO: 74697 - RNA, 33 nt, synthetic construct
  misc_feature 1..33: note = Trafficking protein particle complex subunit 11 (54-64)
  source 1..33: mol_type = other RNA
aaggtgctgcccggcgaccacgagtaccctaaa

SEQ ID NO: 74698 - RNA, 33 nt, synthetic construct
  misc_feature 1..33: note = B-cell CLL/lymphoma 7 protein family member B (20-30)
  source 1..33: mol_type = other RNA
aaggtgatggccgctatcgagaaagtcagaaag

SEQ ID NO: 74699 - RNA, 27 nt, synthetic construct
  misc_feature 1..27: note = Uncharacterized protein C10orf88 (295-303)
  source 1..27: mol_type = other RNA
aaggtgatgccccagaaccacagcttc

SEQ ID NO: 74700 - RNA, 27 nt, synthetic construct
  misc_feature 1..27: note = Max-like protein X (158-166)
  source 1..27: mol_type = other RNA
aaggtgaactacgagcagatcgtcaaa

SEQ ID NO: 74701 - RNA, 27 nt, synthetic construct
  misc_feature 1..27: note = Mitochondrial antiviral-signaling protein (311-319)
  source 1..27: mol_type = other RNA
aaggtgcccgccaaccctgctagcgtc

SEQ ID NO: 74702 - RNA, 30 nt, synthetic construct
  misc_feature 1..30: note = Guanine nucleotide-binding protein G(s) subunit alpha isoforms short (77-86)
  source 1..30: mol_type = other RNA
aaggtgcaggacatcaaaaacaatctgaag

SEQ ID NO: 74703 - RNA, 30 nt, synthetic construct
  misc_feature 1..30: note = Kinectin (324-333)
  source 1..30: mol_type = other RNA
aaggtgcaggagctgcaaaacctccttaaa

SEQ ID NO: 74704 - RNA, 27 nt, synthetic construct
  misc_feature 1..27: note = Centromere protein F (2787-2795)
  source 1..27: mol_type = other RNA
aaggtgagagaggaaatcgccgagtac

SEQ ID NO: 74705 - RNA, 27 nt, synthetic construct
  misc_feature 1..27: note = Transcription elongation factor SPT6 (191-199)
  source 1..27: mol_type = other RNA
aaggtgagcgacggcatctaccagcac

SEQ ID NO: 74706 - RNA, 27 nt, synthetic construct
  misc_feature 1..27: note = Peptidyl-prolyl cis-trans isomerase FKBP3 (80-88)
  source 1..27: mol_type = other RNA
aaggtgagcgagcaggtcaaaaacgtt

SEQ ID NO: 74707 - RNA, 27 nt, synthetic construct
  misc_feature 1..27: note = Exocyst complex component 7 (506-514)
  source 1..27: mol_type = other RNA
aaggtgaccgactacatcgccgagaaa

SEQ ID NO: 74708 - RNA, 27 nt, synthetic construct
  misc_feature 1..27: note = 39S ribosomal protein L51, mitochondrial (1-9)
  source 1..27: mol_type = other RNA
aaggtggtcgacagatggaacgagaaa

SEQ ID NO: 74709 - RNA, 27 nt, synthetic construct
  misc_feature 1..27: note = Zinc finger CCHC-type and RNA-binding motif-containing protein 1 (35-43)
  source 1..27: mol_type = other RNA
aaggtggtcaaagttaccatcatgaag

SEQ ID NO: 74710 - RNA, 27 nt, synthetic construct
  misc_feature 1..27: note = Liprin-beta-1 (756-764)
  source 1..27: mol_type = other RNA
aaggtggtcagcgttctgcaccatctc

SEQ ID NO: 74711 - RNA, 27 nt, synthetic construct
  misc_feature 1..27: note = Pre-mRNA-splicing factor SPF27 (136-144)
  source 1..27: mol_type = other RNA
aaggtgtacaacgagaatctggtccac

SEQ ID NO: 74712 - RNA, 27 nt, synthetic construct
  misc_feature 1..27: note = Extended synaptotagmin-2 (225-233)
  source 1..27: mol_type = other RNA
aaggtgtacaccgagaacgtcgacaaa

SEQ ID NO: 74713 - RNA, 27 nt, synthetic construct
  misc_feature 1..27: note = DNA helicase MCM8 (563-571)
  source 1..27: mol_type = other RNA
aagtacatcggctatgccagacagtac

SEQ ID NO: 74714 - RNA, 27 nt, synthetic construct
  misc_feature 1..27: note = Ubiquitin-associated protein 2-like (970-978)
  source 1..27: mol_type = other RNA
aagtacccccctccatataaacacttc

SEQ ID NO: 74715 - RNA, 27 nt, synthetic construct
  misc_feature 1..27: note = Fc receptor-like protein 3 (587-595)
  source 1..27: mol_type = other RNA
ctggccgctgcagccgcgctccttcac

SEQ ID NO: 74716 - RNA, 30 nt, synthetic construct
  misc_feature 1..30: note = Nucleosome assembly protein 1-like 1 (320-329)
  source 1..30: mol_type = other RNA
ctggccgctgacttcgagatcggccacttt

SEQ ID NO: 74717 - RNA, 27 nt, synthetic construct
  misc_feature 1..27: note = Lanosterol 14-alpha demethylase (46-54)
  source 1..27: mol_type = other RNA
ctggccgctggccacctcgtgcagctt

SEQ ID NO: 74718 - RNA, 24 nt, synthetic construct
  misc_feature 1..24: note = KIAA1751 protein (14-21)
  source 1..24: mol_type = other RNA
ctggccgacgctctccttctggag

SEQ ID NO: 74719 - RNA, 27 nt, synthetic construct
  misc_feature 1..27: note = Tripartite motif-containing protein 35 (187-195)
  source 1..27: mol_type = other RNA
ctggccgacgagaagatgaaacagctc

SEQ ID NO: 74720 - RNA, 27 nt, synthetic construct
  misc_feature 1..27: note = Rho GTPase-activating protein 11B (163-171)
  source 1..27: mol_type = other RNA
ctggccgaccacaccgtgcatgtcctc

SEQ ID NO: 74721 - RNA, 30 nt, synthetic construct
  misc_feature 1..30: note = Annexin A1 (198-207)
  source 1..30: mol_type = other RNA
ctggccgacagcgatgctagagcactctac

SEQ ID NO: 74722 - RNA, 33 nt, synthetic construct
  misc_feature 1..33: note = Macrophage migration inhibitory factor (82-92)
  source 1..33: mol_type = other RNA
ctggccgagagactcaggatcagccccgaccgg

SEQ ID NO: 74723 - RNA, 27 nt, synthetic construct
  misc_feature 1..27: note = MICOS complex subunit MIC10 (43-51)
  source 1..27: mol_type = other RNA
ctggccttcggcagcgggatgggactc

SEQ ID NO: 74724 - RNA, 27 nt, synthetic construct
  misc_feature 1..27: note = Dedicator of cytokinesis protein 11 (1003-1011)
  source 1..27: mol_type = other RNA
ctggccatcattccccacgtgaccata

SEQ ID NO: 74725 - RNA, 33 nt, synthetic construct
  misc_feature 1..33: note = Thioredoxin domain-containing protein 15 (243-253)
  source 1..33: mol_type = other RNA
ctggccctcgacgctagccagcactcctctctt

SEQ ID NO: 74726 - RNA, 27 nt, synthetic construct
  misc_feature 1..27: note = Ribosomal protein S6 kinase alpha-2 (72-80)
  source 1..27: mol_type = other RNA
ctggccctcgaccaccttcatagcctg

SEQ ID NO: 74727 - RNA, 27 nt, synthetic construct
  misc_feature 1..27: note = Breast cancer type 2 susceptibility protein (901-909)
  source 1..27: mol_type = other RNA
ctggccctcggcaacaccaaggagctt

SEQ ID NO: 74728 - RNA, 27 nt, synthetic construct
  misc_feature 1..27: note = Dual specificity protein phosphatase 3 (113-121)
  source 1..27: mol_type = other RNA
ctggcccagaagaacggcagagtgctc

SEQ ID NO: 74729 - RNA, 27 nt, synthetic construct
  misc_feature 1..27: note = Transmembrane protein 8A (26-34)
  source 1..27: mol_type = other RNA
ctggccagaccccctccagctagcgca

SEQ ID NO: 74730 - RNA, 36 nt, synthetic construct
  misc_feature 1..36: note = Serine protease 56 (350-361)
  source 1..36: mol_type = other RNA
ctggcctgggacccccctcaggagctccaagctgat

SEQ ID NO: 74731 - RNA, 30 nt, synthetic construct
  misc_feature 1..30: note = Vacuolar protein sorting-associated protein 13B (3150-3159)
  source 1..30: mol_type = other RNA
ctggacgccagcctccttcagaagcaaatc

SEQ ID NO: 74732 - RNA, 39 nt, synthetic construct
  misc_feature 1..39: note = Zinc finger protein castor homolog 1 (1616-1628)
  source 1..39: mol_type = other RNA
ctggacggcagcctctcccttggggccgagcccggatct

SEQ ID NO: 74733 - RNA, 27 nt, synthetic construct
  misc_feature 1..27: note = Connector enhancer of kinase suppressor of ras 3 (161-169)
  source 1..27: mol_type = other RNA
ctggacctcaccacaactgtgcagaag

SEQ ID NO: 74734 - RNA, 30 nt, synthetic construct
  misc_feature 1..30: note = Coiled-coil domain-containing protein 66 (308-317)
  source 1..30: mol_type = other RNA
ctggaccagagcagagagaccgtgctcctt

SEQ ID NO: 74735 - RNA, 33 nt, synthetic construct
  misc_feature 1..33: note = Protein S100-A9 (66-76)
  source 1..33: mol_type = other RNA
ctggacaccaacgccgataagcagctcagcttc

SEQ ID NO: 74736 - RNA, 27 nt, synthetic construct
  misc_feature 1..27: note = Uveal autoantigen with coiled-coil domains and ankyrin repeats (769-777)
  source 1..27: mol_type = other RNA
ctggacgtgacccagaagtacacagag

SEQ ID NO: 74737 - RNA, 27 nt, synthetic construct
  misc_feature 1..27: note = Actin-binding LIM protein 1 (304-312)
  source 1..27: mol_type = other RNA
ctggactacaaggatctcgccgctatc

SEQ ID NO: 74738 - RNA, 30 nt, synthetic construct
  misc_feature 1..30: note = Uncharacterized protein (163-172)
  source 1..30: mol_type = other RNA
ctggaggaatacaacaagatcctccttgac

SEQ ID NO: 74739 - RNA, 30 nt, synthetic construct
  misc_feature 1..30: note = Tyrosinase (279-288)
  source 1..30: mol_type = other RNA
ctggaggaatacaacagccaccagtccctc

SEQ ID NO: 74740 - RNA, 30 nt, synthetic construct
  misc_feature 1..30: note = Vimentin (404-413)
  source 1..30: mol_type = other RNA
ctggagggcgaagagagcagaatctccctc

SEQ ID NO: 74741 - RNA, 51 nt, synthetic construct
  misc_feature 1..51: note = Keratin, type I cytoskeletal 10 (257-273)
  source 1..51: mol_type = other RNA
ctggagggcgaagggagctccggaggtggcgggagaggaggcggttctttc

SEQ ID NO: 74742 - RNA, 30 nt, synthetic construct
  misc_feature 1..30: note = Eukaryotic translation initiation factor 3 subunit M (232-241)
  source 1..30: mol_type = other RNA
ctggagggcgaactcatccacgaccttctg

SEQ ID NO: 74743 - RNA, 27 nt, synthetic construct
  misc_feature 1..27: note = Nestin (589-597)
  source 1..27: mol_type = other RNA
ctggagaaggaaaacaaagagctcctt

SEQ ID NO: 74744 - RNA, 33 nt, synthetic construct
  misc_feature 1..33: note = Protein FAM167B (131-141)
  source 1..33: mol_type = other RNA
ctggagctcgaacccggcgccgggcttgctctg

SEQ ID NO: 74745 - RNA, 27 nt, synthetic construct
  misc_feature 1..27: note = Nestin (560-568)
  source 1..27: mol_type = other RNA
ctggagaaccagagccacgaaaccctc

SEQ ID NO: 74746 - RNA, 30 nt, synthetic construct
  misc_feature 1..30: note = Alpha-actinin-4 (707-716)
  source 1..30: mol_type = other RNA
ctggagcagcaacaccagctcatccaggaa

SEQ ID NO: 74747 - RNA, 33 nt, synthetic construct
  misc_feature 1..33: note = Ribosomal protein S6 kinase delta-1 (1025-1035)
  source 1..33: mol_type = other RNA
ctggagagactcggcgccggggtggctggagtc

SEQ ID NO: 74748 - RNA, 27 nt, synthetic construct
  misc_feature 1..27: note = Coiled-coil domain-containing protein 77 (409-417)
  source 1..27: mol_type = other RNA
ctggagagaaggcggatcctcgaagtg

SEQ ID NO: 74749 - RNA, 27 nt, synthetic construct
  misc_feature 1..27: note = Hydrocephalus-inducing protein homolog (151-159)
  source 1..27: mol_type = other RNA
ctgttcgaccacgtgaccgagagagaa

SEQ ID NO: 74750 - RNA, 21 nt, synthetic construct
  misc_feature 1..21: note = Nucleoredoxin (9-15)
  source 1..21: mol_type = other RNA
ctgggcgagaagctcgtgacc

SEQ ID NO: 74751 - RNA, 39 nt, synthetic construct; identical to SEQ ID NO: 50524
  misc_feature 1..39: note = Protein S100-A9 (26-38)
  source 1..39: mol_type = other RNA

SEQ ID NO: 74752 - RNA, 27 nt, synthetic construct
  misc_feature 1..27: note = Serine beta-lactamase-like protein LACTB, mitochondrial (52-60)
  source 1..27: mol_type = other RNA
ctgggcgtgaagctcgccgggggactt

SEQ ID NO: 74753 - RNA, 33 nt, synthetic construct
  misc_feature 1..33: note = Galectin-1 (43-53)
  source 1..33: mol_type = other RNA
ctgcacttcaaccccagatttaatgcccatggc

SEQ ID NO: 74754 - RNA, 30 nt, synthetic construct
  misc_feature 1..30: note = Translocon-associated protein subunit gamma (176-185)
  source 1..30: mol_type = other RNA
ctgatcgccctccttagcaccggctccaag

SEQ ID NO: 74755 - RNA, 30 nt, synthetic construct
  misc_feature 1..30: note = Alpha-actinin-4 (718-727)
  source 1..30: mol_type = other RNA
ctgatcttcgacaacaagcacaccaattac

SEQ ID NO: 74756 - RNA, 30 nt, synthetic construct
  misc_feature 1..30: note = Solute carrier family 40 member 1 (135-144)
  source 1..30: mol_type = other RNA
ctgatcattaccatagccaacatcgctaat

SEQ ID NO: 74757 - RNA, 33 nt, synthetic construct
  misc_feature 1..33: note = Prohibitin (163-173)
  source 1..33: mol_type = other RNA
ctgatcctcgacgatgtgagccttacccacctg

SEQ ID NO: 74758 - RNA, 30 nt, synthetic construct
  misc_feature 1..30: note = Lysosomal-associated transmembrane protein 4B (214-223)
  source 1..30: mol_type = other RNA
ctgatctaccccaacagcattcaggagtat

SEQ ID NO: 74759 - RNA, 27 nt, synthetic construct
  misc_feature 1..27: note = Desmoplakin (486-494)
  source 1..27: mol_type = other RNA
ctgaaggagcaggccatcaaaattacc

SEQ ID NO: 74760 - RNA, 27 nt, synthetic construct
  misc_feature 1..27: note = Histone deacetylase complex subunit SAP30L (60-68)
  source 1..27: mol_type = other RNA
ctgaagctcgacatcgataaaagcctt

SEQ ID NO: 74761 - RNA, 30 nt, synthetic construct
  misc_feature 1..30: note = Lipoxygenase homology domain-containing protein 1 (933-942)
  source 1..30: mol_type = other RNA
ctgaagagctccaaaaccaactctgacaag

SEQ ID NO: 74762 - RNA, 27 nt, synthetic construct
  misc_feature 1..27: note = Alpha-1-antichymotrypsin (12-20)
  source 1..27: mol_type = other RNA
ctgctcgccgctggcttctgccccgca

SEQ ID NO: 74763 - RNA, 33 nt, synthetic construct
  misc_feature 1..33: note = Granulocyte-macrophage colony-stimulating factor receptor subunit alpha (9-19)
  source 1..33: mol_type = other RNA
ctgctctgcgagcttccccaccctgccttcctg

SEQ ID NO: 74764 - RNA, 27 nt, synthetic construct
  misc_feature 1..27: note = Probable serine carboxypeptidase CPVL (258-266)
  source 1..27: mol_type = other RNA
ctgctcgacgagaagcagaaaaagtac

SEQ ID NO: 74765 - RNA, 27 nt, synthetic construct
  misc_feature 1..27: note = Teashirt homolog 3 (435-443)
  source 1..27: mol_type = other RNA
ctgctcgacgagaaggtgcagagcgtc

SEQ ID NO: 74766 - RNA, 27 nt, synthetic construct
  misc_feature 1..27: note = Alpha-aminoadipic semialdehyde synthase, mitochondrial (668-676)
  source 1..27: mol_type = other RNA
ctgctcgacggcaaggtggtcaacgtt

SEQ ID NO: 74767 - RNA, 27 nt, synthetic construct
  misc_feature 1..27: note = Catenin delta-1 (315-323)
  source 1..27: mol_type = other RNA
ctgctcgaccaccccaagaaagaggtg

SEQ ID NO: 74768 - RNA, 27 nt, synthetic construct
  misc_feature 1..27: note = Interleukin-13 receptor subunit alpha-2 (164-172)
  source 1..27: mol_type = other RNA
ctgctcgacaccaactacaatcttttc

SEQ ID NO: 74769 - RNA, 30 nt, synthetic construct
  misc_feature 1..30: note = Interleukin-13 receptor subunit alpha-2 (164-173)
  source 1..30: mol_type = other RNA
ctgctcgacaccaactacaatcttttctat

SEQ ID NO: 74770 - RNA, 30 nt, synthetic construct
  misc_feature 1..30: note = RAD50-interacting protein 1 (435-444)
  source 1..30: mol_type = other RNA
ctgctcttcgagagagaacttcacagcgtg

SEQ ID NO: 74771 - RNA, 39 nt, synthetic construct
  misc_feature 1..39: note = Sorting nexin-21 (131-143)
  source 1..39: mol_type = other RNA
ctgctcttcgaggtgaccagcgccaacgtcgttaaggac

SEQ ID NO: 74772 - RNA, 27 nt, synthetic construct
  misc_feature 1..27: note = Complement decay-accelerating factor (14-22)
  source 1..27: mol_type = other RNA
ctgctcggcgagcttcccagactgttg

SEQ ID NO: 74773 - RNA, 27 nt, synthetic construct
  misc_feature 1..27: note = Torsin-1A-interacting protein 2, isoform IFRG15 (90-98)
  source 1..27: mol_type = other RNA
ctgctcggcccccctcttgtgagaaag

SEQ ID NO: 74774 - RNA, 33 nt, synthetic construct
  misc_feature 1..33: note = Collagen alpha-1(IV) chain (17-27)
  source 1..33: mol_type = other RNA
ctgctccacgaggaacatagcagagccgctgca

SEQ ID NO: 74775 - RNA, 27 nt, synthetic construct
  misc_feature 1..27: note = Pescadillo homolog (73-81)
  source 1..27: mol_type = other RNA
ctgctccacgagcccatcgtgaacaag

SEQ ID NO: 74776 - RNA, 24 nt, synthetic construct
  misc_feature 1..24: note = DST protein (851-858)
  source 1..24: mol_type = other RNA
ctgctcaaggacaaacttgatgag

SEQ ID NO: 74777 - RNA, 27 nt, synthetic construct
  misc_feature 1..27: note = Inverted formin-2 (76-84)
  source 1..27: mol_type = other RNA
ctgctccttgaggccctggctagattg

SEQ ID NO: 74778 - RNA, 33 nt, synthetic construct
  misc_feature 1..33: note = Metastasis suppressor protein 1 (174-184)
  source 1..33: mol_type = other RNA
ctgctccttgaggaaaccgagaagcaggccgtg

SEQ ID NO: 74779 - RNA, 33 nt, synthetic construct
  misc_feature 1..33: note = Signal transducer and activator of transcription 6 (550-560)
  source 1..33: mol_type = other RNA
ctgctccttaacgagcccgacggcaccttcctg

SEQ ID NO: 74780 - RNA, 27 nt, synthetic construct
  misc_feature 1..27: note = Carboxypeptidase N catalytic chain (379-387)
  source 1..27: mol_type = other RNA
ctgctccttcccggcatctacaccgtg

SEQ ID NO: 74781 - RNA, 27 nt, synthetic construct
  misc_feature 1..27: note = KATNB1-like protein 1 (135-143)
  source 1..27: mol_type = other RNA
ctgctcagaaacatccagattcttaag

SEQ ID NO: 74782 - RNA, 27 nt, synthetic construct
  misc_feature 1..27: note = Zinc finger protein ubi-d4 (122-130)
  source 1..27: mol_type = other RNA
ctgctcagaaccgacccccttgagaag

SEQ ID NO: 74783 - RNA, 33 nt, synthetic construct; identical to SEQ ID NO: 50556
  misc_feature 1..33: note = Cytoplasmic dynein 1 heavy chain 1 (2160-2170)
  source 1..33: mol_type = other RNA

SEQ ID NO: 74784 - RNA, 33 nt, synthetic construct
  misc_feature 1..33: note = Aspartate beta-hydroxylase domain-containing protein 1 (342-352)
  source 1..33: mol_type = other RNA
ctgctcgtggacgatagcttccttcacaccgtc

SEQ ID NO: 74785 - RNA, 33 nt, synthetic construct
  misc_feature 1..33: note = Lon protease homolog 2, peroxisomal (173-183)
  source 1..33: mol_type = other RNA
ctgctcgtgagacagatcgagggccttaagctg

SEQ ID NO: 74786 - RNA, 30 nt, synthetic construct
  misc_feature 1..30: note = Growth hormone-inducible transmembrane protein (291-300)
  source 1..30: mol_type = other RNA
ctgctctacgacacccagaaggtgatcaaa

SEQ ID NO: 74787 - RNA, 27 nt, synthetic construct
  misc_feature 1..27: note = Integrin alpha-7 (875-883)
  source 1..27: mol_type = other RNA
ctgctctaccccatgcaggtggagctt

SEQ ID NO: 74788 - RNA, 33 nt, synthetic construct
  misc_feature 1..33: note = Protein FAM69B (179-189)
  source 1..33: mol_type = other RNA
ctgatggccgacttcaacaaggataatagagtg

SEQ ID NO: 74789 - RNA, 27 nt, synthetic construct
  misc_feature 1..27: note = Pre-mRNA-processing factor 6 (250-258)
  source 1..27: mol_type = other RNA
ctgatggacatgagactcagccaggtg

SEQ ID NO: 74790 - RNA, 27 nt, synthetic construct
  misc_feature 1..27: note = L-dopachrome tautomerase (194-202)
  source 1..27: mol_type = other RNA
ctgatggagacccacctcagctccaag

SEQ ID NO: 74791 - RNA, 27 nt, synthetic construct
  misc_feature 1..27: note = Hippocampus abundant transcript-like protein 1 (59-67)
  source 1..27: mol_type = other RNA
ctgatgaacggcctcatccagggggtg

SEQ ID NO: 74792 - RNA, 36 nt, synthetic construct
  misc_feature 1..36: note = Vimentin (413-424)
  source 1..36: mol_type = other RNA
ctgcccctccctaacttcagctcccttaatctgaga

SEQ ID NO: 74793 - RNA, 30 nt, synthetic construct
  misc_feature 1..30: note = Vimentin (431-440)
  source 1..30: mol_type = other RNA
ctgcccctcgtggacacccacagcaagaga

SEQ ID NO: 74794 - RNA, 27 nt, synthetic construct
  misc_feature 1..27: note = Ectonucleotide pyrophosphatase/phosphodiesterase family member 1 (605-613)
  source 1..27: mol_type = other RNA
ctgccctacggcagacctagggtgctc

SEQ ID NO: 74795 - RNA, 30 nt, synthetic construct
  misc_feature 1..30: note = Eukaryotic translation initiation factor 5A-1 (102-111)
  source 1..30: mol_type = other RNA
ctgcaggacagcggcgaggtgagagaagat

SEQ ID NO: 74796 - RNA, 27 nt, synthetic construct
  misc_feature 1..27: note = Coiled-coil domain-containing protein 13 (338-346)
  source 1..27: mol_type = other RNA
ctgcagagagagctcgaagagcttaag

SEQ ID NO: 74797 - RNA, 27 nt, synthetic construct
  misc_feature 1..27: note = Zinc finger protein 703 (534-542)
  source 1..27: mol_type = other RNA
ctgagaaacccccacaccctcggcctt

SEQ ID NO: 74798 - RNA, 30 nt, synthetic construct
  misc_feature 1..30: note = ATP-binding cassette sub-family A member 13 (39-48)
  source 1..30: mol_type = other RNA
ctgagcgccatccagggcgtgaccctcgct

SEQ ID NO: 74799 - RNA, 33 nt, synthetic construct
  misc_feature 1..33: note = GPI-anchor transamidase (151-161)
  source 1..33: mol_type = other RNA
ctgagcgacgatagatccaacatcctcatttac

SEQ ID NO: 74800 - RNA, 27 nt, synthetic construct
  misc_feature 1..27: note = General transcription factor 3C polypeptide 2 (596-604)
  source 1..27: mol_type = other RNA
ctgagcgacggctccctcaagctttac

SEQ ID NO: 74801 - RNA, 27 nt, synthetic construct
  misc_feature 1..27: note = Myotubularin-related protein 5 (501-509)
  source 1..27: mol_type = other RNA
ctgagcgaccccttctacagaaccctc

SEQ ID NO: 74802 - RNA, 27 nt, synthetic construct
  misc_feature 1..27: note = Low affinity immunoglobulin gamma Fc region receptor II-b (113-121)
  source 1..27: mol_type = other RNA
ctgagcgaccccgtgcacctcaccgtc

SEQ ID NO: 74803 - RNA, 27 nt, synthetic construct
  misc_feature 1..27: note = Tyrosine-protein kinase JAK1 (30-38)
  source 1..27: mol_type = other RNA
ctgagcgacagagagcccctcaggctt

SEQ ID NO: 74804 - RNA, 27 nt, synthetic construct
  misc_feature 1..27: note = Exportin-5 (689-697)
  source 1..27: mol_type = other RNA
ctgagcgacgtggatgccttcatcgct

SEQ ID NO: 74805 - RNA, 33 nt, synthetic construct
  misc_feature 1..33: note = DNA polymerase zeta catalytic subunit (2423-2433)
  source 1..33: mol_type = other RNA
ctgagcgactggttcgataacaagaccgacctc

SEQ ID NO: 74806 - RNA, 27 nt, synthetic construct
  misc_feature 1..27: note = Little elongation complex subunit 1 (1975-1983)
  source 1..27: mol_type = other RNA
ctgagcgagctcaagatccagaaaatt

SEQ ID NO: 74807 - RNA, 33 nt, synthetic construct
  misc_feature 1..33: note = Cell surfaceoprotein MUC18 (332-342)
  source 1..33: mol_type = other RNA
ctgagcgagccccaggaactccttgtgaactac

SEQ ID NO: 74808 - RNA, 27 nt, synthetic construct
  misc_feature 1..27: note = Putative stereocilin-like protein (36-44)
  source 1..27: mol_type = other RNA
ctgagcttcctcaagtcccttctgtct

SEQ ID NO: 74809 - RNA, 27 nt, synthetic construct
  misc_feature 1..27: note = Melanocyte protein PMEL (177-185)
  source 1..27: mol_type = other RNA
ctgagcatcggcaccgggagagccatg

SEQ ID NO: 74810 - RNA, 27 nt, synthetic construct
  misc_feature 1..27: note = Cytoplasmic dynein 1 heavy chain 1 (746-754)
  source 1..27: mol_type = other RNA
ctgagcaaggaggtgagaaacctcaaa

SEQ ID NO: 74811 - RNA, 27 nt, synthetic construct
  misc_feature 1..27: note = Exophilin-5 (986-994)
  source 1..27: mol_type = other RNA
ctgagcaagaccgagtccatctctgtg

SEQ ID NO: 74812 - RNA, 30 nt, synthetic construct
  misc_feature 1..30: note = EF-hand calcium-binding domain-containing protein 6 (344-353)
  source 1..30: mol_type = other RNA
ctgagcctccccacccaggagcttagacct

SEQ ID NO: 74813 - RNA, 27 nt, synthetic construct
  misc_feature 1..27: note = Methylcrotonoyl-CoA carboxylase subunit alpha, mitochondrial (108-116)
  source 1..27: mol_type = other RNA
ctgagcatggagaagatcattcaggtg

SEQ ID NO: 74814 - RNA, 33 nt, synthetic construct
  misc_feature 1..33: note = Zinc finger and BTB domain-containing protein 34 (63-73)
  source 1..33: mol_type = other RNA
ctgagcaccatgtccggcctctctatctcagtg

SEQ ID NO: 74815 - RNA, 27 nt, synthetic construct
  misc_feature 1..27: note = Vacuolar protein sorting-associated protein 13B (1713-1721)
  source 1..27: mol_type = other RNA
ctgagcgtggcccaggtccaactcctt

SEQ ID NO: 74816 - RNA, 27 nt, synthetic construct
  misc_feature 1..27: note = PERQ amino acid-rich with GYF domain-containing protein 1 (92-100)
  source 1..27: mol_type = other RNA
ctgagcgtgaactccgtcgccgttctc

SEQ ID NO: 74817 - RNA, 33 nt, synthetic construct
  misc_feature 1..33: note = Mitogen-activated protein kinase 14 (122-132)
  source 1..33: mol_type = other RNA
ctgaccgacgatcacgtgcagttcctcatctac

SEQ ID NO: 74818 - RNA, 33 nt, synthetic construct
  misc_feature 1..33: note = FAST kinase domain-containing protein 5 (625-635)
  source 1..33: mol_type = other RNA
ctgaccgacgatctcatgaacaagcttctgaaa

SEQ ID NO: 74819 - RNA, 33 nt, synthetic construct
  misc_feature 1..33: note = Vacuolar protein sorting-associated protein VTA1 homolog (134-144)
  source 1..33: mol_type = other RNA
ctgaccgacgagaacgtgaagcacagaaaatac

SEQ ID NO: 74820 - RNA, 30 nt, synthetic construct
  misc_feature 1..30: note = Ectonucleoside triphosphate diphosphohydrolase 4 (199-208)
  source 1..30: mol_type = other RNA
ctgaccgacatccccgtgcacttcgatttt

SEQ ID NO: 74821 - RNA, 21 nt, synthetic construct
  misc_feature 1..21: note = 39S ribosomal protein L52, mitochondrial (43-49)
  source 1..21: mol_type = other RNA
ctgaccgagctccccgactgg

SEQ ID NO: 74822 - RNA, 30 nt, synthetic construct
  misc_feature 1..30: note = Glutathione S-transferase theta-1 (64-73)
  source 1..30: mol_type = other RNA
ctgaccgagagcgtggccatcctcctttac

SEQ ID NO: 74823 - RNA, 27 nt, synthetic construct
  misc_feature 1..27: note = AFG3-like protein 2 (346-354)
  source 1..27: mol_type = other RNA
ctgaccggcccccctgggacaggaaag

SEQ ID NO: 74824 - RNA, 21 nt, synthetic construct
  misc_feature 1..21: note = Keratin, type I cytoskeletal 9 (86-92)
  source 1..21: mol_type = other RNA
ctgaccaagacactcaacgac

SEQ ID NO: 74825 - RNA, 33 nt, synthetic construct
  misc_feature 1..33: note = Amphoterin-induced protein 1 (187-197)
  source 1..33: mol_type = other RNA
ctgaccctccttgacctgagctccaacaagttg

SEQ ID NO: 74826 - RNA, 27 nt, synthetic construct
  misc_feature 1..27: note = Delta and Notch-like epidermal growth factor-related receptor (632-640)
  source 1..27: mol_type = other RNA
ctgaccaacatgcccagacacagcctc

SEQ ID NO: 74827 - RNA, 36 nt, synthetic construct
  misc_feature 1..36: note = Synaptosomal-associated protein 23 (156-167)
  source 1..36: mol_type = other RNA
ctgacccaggtgggcagcatcctcgggaaccttaag

SEQ ID NO: 74828 - RNA, 33 nt, synthetic construct
  misc_feature 1..33: note = Inactive rhomboid protein 2 (165-175)
  source 1..33: mol_type = other RNA
ctgaccagcttcacatccgtgagatctggctac

SEQ ID NO: 74829 - RNA, 27 nt, synthetic construct
  misc_feature 1..27: note = Tubulin beta-4B chain (273-281)
  source 1..27: mol_type = other RNA
ctgaccagcagaggctcccagcaatac

SEQ ID NO: 74830 - RNA, 27 nt, synthetic construct
  misc_feature 1..27: note = Tectonic-3 (319-327)
  source 1..27: mol_type = other RNA
ctgaccgtggagcccggcgccagcctc

SEQ ID NO: 74831 - RNA, 30 nt, synthetic construct
  misc_feature 1..30: note = LON peptidase N-terminal domain and RING finger protein 1 (764-773)
  source 1..30: mol_type = other RNA
ctgacctacttcagcagagaccagtccaag

SEQ ID NO: 74832 - RNA, 45 nt, synthetic construct
  misc_feature 1..45: note = 60S ribosomal protein L34 (5-19)
  source 1..45: mol_type = other RNA
ctgacctacagaaggcggctcagctataacacagcctccaataag

SEQ ID NO: 74833 - RNA, 30 nt, synthetic construct
  misc_feature 1..30: note = Aspartate beta-hydroxylase domain-containing protein 1 (343-352)
  source 1..30: mol_type = other RNA
ctggtggacgatagcttcctccacaccgtc

SEQ ID NO: 74834 - RNA, 24 nt, synthetic construct
  misc_feature 1..24: note = Cytosolic non-specific dipeptidase (250-257)
  source 1..24: mol_type = other RNA
ctggtggacaagagaggcaacatc

SEQ ID NO: 74835 - RNA, 30 nt, synthetic construct
  misc_feature 1..30: note = Thymidine phosphorylase (223-232)
  source 1..30: mol_type = other RNA
ctggtggagggcctcagcgcccttgtcgtt

SEQ ID NO: 74836 - RNA, 27 nt, synthetic construct
  misc_feature 1..27: note = Matrin-3 (461-469)
  source 1..27: mol_type = other RNA
ctggtgttcggcaagcccgtcagagtt

SEQ ID NO: 74837 - RNA, 33 nt, synthetic construct; identical to SEQ ID NO: 50610
  misc_feature 1..33: note = POTE ankyrin domain family member F (708-718)
  source 1..33: mol_type = other RNA

SEQ ID NO: 74838 - RNA, 33 nt, synthetic construct; identical to SEQ ID NO: 50611
  misc_feature 1..33: note = Phospholipid hydroperoxide glutathione peroxidase, mitochondrial (187-197)
  source 1..33: mol_type = other RNA

SEQ ID NO: 74839 - RNA, 33 nt, synthetic construct
  misc_feature 1..33: note = Roquin-2 (100-110)
  source 1..33: mol_type = other RNA
ctggtgatcgagagcattcccgtcctcggcacc

SEQ ID NO: 74840 - RNA, 27 nt, synthetic construct
  misc_feature 1..27: note = Probable ATP-dependent RNA helicase DDX17 (248-256)
  source 1..27: mol_type = other RNA
ctggtgctcgcccccaccagagagctt

SEQ ID NO: 74841 - RNA, 27 nt, synthetic construct
  misc_feature 1..27: note = Melanocyte protein PMEL (10-18)
  source 1..27: mol_type = other RNA
ctggtgctcaagagatgccttctgcac

SEQ ID NO: 74842 - RNA, 39 nt, synthetic construct
  misc_feature 1..39: note = Beta-actin-like protein 2 (9-21)
  source 1..39: mol_type = other RNA
ctggtggtcgacaacggcagcgggatgtgcaaggccgga

SEQ ID NO: 74843 - RNA, 27 nt, synthetic construct
  misc_feature 1..27: note = DNA mismatch repair protein Msh6 (111-119)
  source 1..27: mol_type = other RNA
ctgtacagccaggccggcctccttgct

SEQ ID NO: 74844 - RNA, 33 nt, synthetic construct
  misc_feature 1..33: note = Olfactory receptor 4M2 (122-132)
  source 1..33: mol_type = other RNA
ctgtacaccgccatctgcagacccctccactat

SEQ ID NO: 74845 - RNA, 39 nt, synthetic construct
  misc_feature 1..39: note = Heterogeneous nuclear ribonucleoprotein L (35-47)
  source 1..39: mol_type = other RNA
atggccgctgcaggcgggggaggtggcgggggaagatac

SEQ ID NO: 74846 - RNA, 30 nt, synthetic construct
  misc_feature 1..30: note = Exocyst complex component 4 (1-10)
  source 1..30: mol_type = other RNA
atggccgctgaggcagccggcgggaagtac

SEQ ID NO: 74847 - RNA, 27 nt, synthetic construct
  misc_feature 1..27: note = Liprin-alpha-1 (538-546)
  source 1..27: mol_type = other RNA
atggccgacggccacaccgatagctac

SEQ ID NO: 74848 - RNA, 27 nt, synthetic construct
  misc_feature 1..27: note = Cystatin-C (1-9)
  source 1..27: mol_type = other RNA
atggccggccccctgagagctcctctc

SEQ ID NO: 74849 - RNA, 30 nt, synthetic construct
  misc_feature 1..30: note = WD repeat-containing protein 7 (1479-1488)
  source 1..30: mol_type = other RNA
atggcccacgacggcaaggagcatagattc

SEQ ID NO: 74850 - RNA, 33 nt, synthetic construct
  misc_feature 1..33: note = WD repeat-containing protein 7 (1479-1489)
  source 1..33: mol_type = other RNA
atggcccacgacggcaaggagcatagattcatg

SEQ ID NO: 74851 - RNA, 27 nt, synthetic construct
  misc_feature 1..27: note = Tubulin polyglutamylase complex subunit 2 (33-41)
  source 1..27: mol_type = other RNA
atggccatcaacagcatttccaagctg

SEQ ID NO: 74852 - RNA, 33 nt, synthetic construct
  misc_feature 1..33: note = Intron-binding protein aquarius (867-877)
  source 1..33: mol_type = other RNA
atggccctggacatcgatgagagacacctcctt

SEQ ID NO: 74853 - RNA, 33 nt, synthetic construct
  misc_feature 1..33: note = Ribonuclease pancreatic (1-11)
  source 1..33: mol_type = other RNA
atggccctggagaagagcctcgtgagacttctg

SEQ ID NO: 74854 - RNA, 36 nt, synthetic construct
  misc_feature 1..36: note = Actin, cytoplasmic 2 (18-29)
  source 1..36: mol_type = other RNA
atggccaccgctgcaagctcctcttcactggagaag

SEQ ID NO: 74855 - RNA, 27 nt, synthetic construct
  misc_feature 1..27: note = STE20-related kinase adapter protein alpha (113-121)
  source 1..27: mol_type = other RNA
atggcctacggcagcgctaaggacctg

SEQ ID NO: 74856 - RNA, 30 nt, synthetic construct
  misc_feature 1..30: note = High mobility group protein 20A (131-140)
  source 1..30: mol_type = other RNA
atggagttcgaagagagaaacgccgctctg

SEQ ID NO: 74857 - RNA, 33 nt, synthetic construct
  misc_feature 1..33: note = Squalene synthase (112-122)
  source 1..33: mol_type = other RNA
atggagagcaaggaaaaagacagacaggtgctg

SEQ ID NO: 74858 - RNA, 27 nt, synthetic construct
  misc_feature 1..27: note = A-kinase anchor protein 11 (545-553)
  source 1..27: mol_type = other RNA
atgatcaaggacagcattcagaaattc

SEQ ID NO: 74859 - RNA, 27 nt, synthetic construct
  misc_feature 1..27: note = Protein mago nashi homolog (45-53)
  source 1..27: mol_type = other RNA
atgatcagaaaggaggaactggagatt

SEQ ID NO: 74860 - RNA, 30 nt, synthetic construct
  misc_feature 1..30: note = Hypoxia-inducible factor 1-alpha (109-118)
  source 1..30: mol_type = other RNA
atgatctacattagcgacaacgtgaataag

SEQ ID NO: 74861 - RNA, 33 nt, synthetic construct
  misc_feature 1..33: note = Nidogen-1 (1-11)
  source 1..33: mol_type = other RNA
atgctggccagctcctctagaatcagggctgca

SEQ ID NO: 74862 - RNA, 33 nt, synthetic construct
  misc_feature 1..33: note = Spectrin beta chain, non-erythrocytic 1 (1424-1434)
  source 1..33: mol_type = other RNA
atgctggagaaccagatggaagtgagaaagaaa

SEQ ID NO: 74863 - RNA, 33 nt, synthetic construct
  misc_feature 1..33: note = Prostate tumor-overexpressed gene 1 protein (184-194)
  source 1..33: mol_type = other RNA
atgctgttcccccacatcagcccttgcgaggtg

SEQ ID NO: 74864 - RNA, 27 nt, synthetic construct
  misc_feature 1..27: note = Melanoma-associated antigen D2 (305-313)
  source 1..27: mol_type = other RNA
atgctgaaggacatcattaaagagtac

SEQ ID NO: 74865 - RNA, 33 nt, synthetic construct
  misc_feature 1..33: note = DNA-directed RNA polymerases I, II, and III subunit RPABC5 (48-58)
  source 1..33: mol_type = other RNA
atgctgctcgcccacgtggaccttatcgagaag

SEQ ID NO: 74866 - RNA, 30 nt, synthetic construct
  misc_feature 1..30: note = Coatomer subunit gamma-1 (404-413)
  source 1..30: mol_type = other RNA
atgctgagagaggaaggcgggttcgagtac

SEQ ID NO: 74867 - RNA, 27 nt, synthetic construct
  misc_feature 1..27: note = G-protein coupled receptor 143 (175-183)
  source 1..27: mol_type = other RNA
atgctgtactatcccagcgtgtccaga

SEQ ID NO: 74868 - RNA, 54 nt, synthetic construct
  misc_feature 1..54: note = G-protein coupled receptor 143 (175-192)
  source 1..54: mol_type = other RNA
atgctgtactatcccagcgtgtccagaaagctccttgagtacatcgaagagatt

SEQ ID NO: 74869 - RNA, 36 nt, synthetic construct
  misc_feature 1..36: note = LIM domain and actin-binding protein 1 (101-112)
  source 1..36: mol_type = other RNA
atgatgttcgagaagggcgaacccacccagacaaaa

SEQ ID NO: 74870 - RNA, 24 nt, synthetic construct
  misc_feature 1..24: note = T-complex protein 1 subunit eta (172-179)
  source 1..24: mol_type = other RNA
atgatgctggacgatctccttcag

SEQ ID NO: 74871 - RNA, 27 nt, synthetic construct
  misc_feature 1..27: note = Neuroblast differentiation-associated protein AHNAK (2771-2779)
  source 1..27: mol_type = other RNA
atgcccaagatcagcatgcctggcttc

SEQ ID NO: 74872 - RNA, 27 nt, synthetic construct
  misc_feature 1..27: note = Neuroblast differentiation-associated protein AHNAK (749-757)
  source 1..27: mol_type = other RNA
atgcccaagatgaaaatgcctaagttc

SEQ ID NO: 74873 - RNA, 27 nt, synthetic construct
  misc_feature 1..27: note = Neuroblast differentiation-associated protein AHNAK (1382-1390)
  source 1..27: mol_type = other RNA
atgcccaaggtgaaaatgcctaagttc

SEQ ID NO: 74874 - RNA, 24 nt, synthetic construct
  misc_feature 1..24: note = ATP-dependent RNA helicase DDX24 (584-591)
  source 1..24: mol_type = other RNA
atgcagtaccccggcagaagcctg

SEQ ID NO: 74875 - RNA, 39 nt, synthetic construct
  misc_feature 1..39: note = Leucine zipper putative tumor suppressor 1 (179-191)
  source 1..39: mol_type = other RNA
atgagctccctgcccacccactctacatcaagtagctac

SEQ ID NO: 74876 - RNA, 27 nt, synthetic construct
  misc_feature 1..27: note = Liprin-alpha-1 (1170-1178)
  source 1..27: mol_type = other RNA
atgagctccccctctatgcagcctaag

SEQ ID NO: 74877 - RNA, 33 nt, synthetic construct
  misc_feature 1..33: note = Vimentin (1-11)
  source 1..33: mol_type = other RNA
atgagcaccagatccgtgtcttcaagtagctac

SEQ ID NO: 74878 - RNA, 27 nt, synthetic construct
  misc_feature 1..27: note = ADP-ribosylation factor-like protein 5B (133-141)
  source 1..27: mol_type = other RNA
atgaccgccgctgagatcagcaagtac

SEQ ID NO: 74879 - RNA, 39 nt, synthetic construct
  misc_feature 1..39: note = CD44 antigen (412-424)
  source 1..39: mol_type = other RNA
atgaccgccgacgagacaagaaacctgcagaatgtggat

SEQ ID NO: 74880 - RNA, 27 nt, synthetic construct
  misc_feature 1..27: note = RNA-binding protein 14 (266-274)
  source 1..27: mol_type = other RNA
atgaccgcccaggctgcaagctacaga

SEQ ID NO: 74881 - RNA, 42 nt, synthetic construct
  misc_feature 1..42: note = TBC1 domain family member 7 (1-14)
  source 1..42: mol_type = other RNA
atgaccgaggacagccagagaaacttcaggtccgtgtactat

SEQ ID NO: 74882 - RNA, 21 nt, synthetic construct
  misc_feature 1..21: note = E3 ubiquitin-protein ligase UBR5 (2723-2729)
  source 1..21: mol_type = other RNA
atgaccgagagacaggacctg

SEQ ID NO: 74883 - RNA, 30 nt, synthetic construct
  misc_feature 1..30: note = SEC14-like protein 2 (333-342)
  source 1..30: mol_type = other RNA
atgaccgaggtgctgcccaaccagagatac

SEQ ID NO: 74884 - RNA, 27 nt, synthetic construct
  misc_feature 1..27: note = Cleavage and polyadenylation specificity factor subunit 3 (99-107)
  source 1..27: mol_type = other RNA
atgacccacgccacaaaggctatctac

SEQ ID NO: 74885 - RNA, 30 nt, synthetic construct
  misc_feature 1..30: note = Protein phosphatase 1G (151-160)
  source 1..30: mol_type = other RNA
atgaccatcgaggaactgctcacaagatac

SEQ ID NO: 74886 - RNA, 39 nt, synthetic construct
  misc_feature 1..39: note = E3 ubiquitin-protein ligase RNF13 (5-17)
  source 1..39: mol_type = other RNA
atgaccagcctggcctgggaccccacaactctcagatac

SEQ ID NO: 74887 - RNA, 27 nt, synthetic construct
  misc_feature 1..27: note = L-dopachrome tautomerase (30-38)
  source 1..27: mol_type = other RNA
atgaccgtggacagcctggtcaacaag

SEQ ID NO: 74888 - RNA, 51 nt, synthetic construct
  misc_feature 1..51: note = 2-oxoisovalerate dehydrogenase subunit alpha, mitochondrial (262-278)
  source 1..51: mol_type = other RNA
atgacctacagaatcggccaccatagcacatccgacgattcttcagcctat

SEQ ID NO: 74889 - RNA, 30 nt, synthetic construct
  misc_feature 1..30: note = Ubiquitin carboxyl-terminal hydrolase 11 (498-507)
  source 1..30: mol_type = other RNA
atggtggccgacgtcttcagccacagattt

SEQ ID NO: 74890 - RNA, 30 nt, synthetic construct
  misc_feature 1..30: note = DnaJ homolog subfamily C member 3 (1-10)
  source 1..30: mol_type = other RNA
atggtggcccccggcagcgtcacctccaga

SEQ ID NO: 74891 - RNA, 42 nt, synthetic construct
  misc_feature 1..42: note = Proteasome subunit beta type-4 (84-97)
  source 1..42: mol_type = other RNA
atggtgatcgacgaggaactgctcggcgatgggcacagctac

SEQ ID NO: 74892 - RNA, 24 nt, synthetic construct
  misc_feature 1..24: note = Adenylate kinase 9 (1518-1525)
  source 1..24: mol_type = other RNA
atggtgatcttcgagctgagcgtc

SEQ ID NO: 74893 - RNA, 33 nt, synthetic construct; identical to SEQ ID NO: 50666
  misc_feature 1..33: note = Zinc transporter ZIP6 (217-227)
  source 1..33: mol_type = other RNA

SEQ ID NO: 74894 - RNA, 27 nt, synthetic construct
  misc_feature 1..27: note = Vigilin (427-435)
  source 1..27: mol_type = other RNA
atggtgaaggacctgatcaacagaatg

SEQ ID NO: 74895 - RNA, 27 nt, synthetic construct
  misc_feature 1..27: note = Helicase with zinc finger domain 2 (1524-1532)
  source 1..27: mol_type = other RNA
atggtgaaggagtacatgatccagttc

SEQ ID NO: 74896 - RNA, 27 nt, synthetic construct
  misc_feature 1..27: note = Major centromere autoantigen B (13-21)
  source 1..27: mol_type = other RNA
atggtgaagagatacctgaccagcttc

SEQ ID NO: 74897 - RNA, 51 nt, synthetic construct
  misc_feature 1..51: note = ATP synthase subunit e, mitochondrial (1-17)
  source 1..51: mol_type = other RNA
atggtgccccctgtccaggttagcccactgatcaagctcggcagatactcc

SEQ ID NO: 74898 - RNA, 30 nt, synthetic construct; identical to SEQ ID NO: 50671
  misc_feature 1..30: note = UV excision repair protein RAD23 homolog B (172-181)
  source 1..30: mol_type = other RNA

SEQ ID NO: 74899 - RNA, 30 nt, synthetic construct
  misc_feature 1..30: note = NGFI-A-binding protein 2 (244-253)
  source 1..30: mol_type = other RNA
atggtggtcgagagcgttgaaagaatcttc

SEQ ID NO: 74900 - RNA, 39 nt, synthetic construct
  misc_feature 1..39: note = Peptidase inhibitor 15 (91-103)
  source 1..39: mol_type = other RNA
atggtgtgggacgagaacctggccaagagcgctgaagca

SEQ ID NO: 74901 - RNA, 27 nt, synthetic construct
  misc_feature 1..27: note = AT-rich interactive domain-containing protein 2 (84-92)
  source 1..27: mol_type = other RNA
aacgccgctttcgcactgaagcagtac

SEQ ID NO: 74902 - RNA, 27 nt, synthetic construct
  misc_feature 1..27: note = Sphingomyelin phosphodiesterase 4 (248-256)
  source 1..27: mol_type = other RNA
aacgccgaccccgctagccacgagatc

SEQ ID NO: 74903 - RNA, 24 nt, synthetic construct
  misc_feature 1..24: note = 60S ribosomal protein L17 (97-104)
  source 1..24: mol_type = other RNA
aacgccgagagcaatgctgaactg

SEQ ID NO: 74904 - RNA, 27 nt, synthetic construct
  misc_feature 1..27: note = Ethylmalonyl-CoA decarboxylase (70-78)
  source 1..27: mol_type = other RNA
aacgccttcagcggcgtgatgatgctg

SEQ ID NO: 74905 - RNA, 45 nt, synthetic construct
  misc_feature 1..45: note = Syndecan-3 (291-305)
  source 1..45: mol_type = other RNA
aacgccatcgacagcggctcctctgctgcacagctgccccaaaag

SEQ ID NO: 74906 - RNA, 27 nt, synthetic construct
  misc_feature 1..27: note = Importin subunit alpha-5 (231-239)
  source 1..27: mol_type = other RNA
aacgccgtgtgggctctgagcaatctc

SEQ ID NO: 74907 - RNA, 30 nt, synthetic construct
  misc_feature 1..30: note = EGF domain-specific O-linked N-acetylglucosamine transferase (20-29)
  source 1..30: mol_type = other RNA
aacgaggccccccctaatacccacagcatc

SEQ ID NO: 74908 - RNA, 27 nt, synthetic construct
  misc_feature 1..27: note = Coatomer subunit beta (113-121)
  source 1..27: mol_type = other RNA
aacgagttcatcagaggcagcaccctg

SEQ ID NO: 74909 - RNA, 33 nt, synthetic construct
  misc_feature 1..33: note = Prefoldin subunit 2 (68-78)
  source 1..33: mol_type = other RNA
aacgagttcagagaaaagcacaatatcaggctg

SEQ ID NO: 74910 - RNA, 27 nt, synthetic construct
  misc_feature 1..27: note = GCN1 general control of amino-acid synthesis 1-like 1 (1511-1519)
  source 1..27: mol_type = other RNA
aacgagttcgtgagagacaccgccctg

SEQ ID NO: 74911 - RNA, 30 nt, synthetic construct
  misc_feature 1..30: note = Dynamin-like 120 kDa protein, mitochondrial (618-627)
  source 1..30: mol_type = other RNA
aacgagatcctggacgaagtgattagcctc

SEQ ID NO: 74912 - RNA, 27 nt, synthetic construct
  misc_feature 1..27: note = Vimentin (102-110)
  source 1..27: mol_type = other RNA
aacgagaaggtggaactgcaggagctc

SEQ ID NO: 74913 - RNA, 36 nt, synthetic construct
  misc_feature 1..36: note = Keratin, type I cytoskeletal 10 (90-101)
  source 1..36: mol_type = other RNA
aaccacgaggaagagatgaaggacctgagaaatgtg

SEQ ID NO: 74914 - RNA, 36 nt, synthetic construct
  misc_feature 1..36: note = Calponin-3 (250-261)
  source 1..36: mol_type = other RNA
aacaaggtggccagccagaaaggcatgtccgtctac

SEQ ID NO: 74915 - RNA, 33 nt, synthetic construct
  misc_feature 1..33: note = Guanine nucleotide-binding protein-like 3-like protein (343-353)
  source 1..33: mol_type = other RNA
aacctggaggaaatcagcaattactatggcgtg

SEQ ID NO: 74916 - RNA, 33 nt, synthetic construct
  misc_feature 1..33: note = Peroxisomal acyl-coenzyme A oxidase 1 (631-641)
  source 1..33: mol_type = other RNA
aacctgttcgagtgggccaagaatagccccctc

SEQ ID NO: 74917 - RNA, 27 nt, synthetic construct
  misc_feature 1..27: note = Galectin-1 (33-41)
  source 1..27: mol_type = other RNA
aacctgggcaaggacagcaataacctc

SEQ ID NO: 74918 - RNA, 33 nt, synthetic construct
  misc_feature 1..33: note = Glycogenin-2 (64-74)
  source 1..33: mol_type = other RNA
aacctgatcgacagcgccgattacattcacctc

SEQ ID NO: 74919 - RNA, 36 nt, synthetic construct
  misc_feature 1..36: note = Putative ATP-dependent RNA helicase DDX11-like protein 8 (397-408)
  source 1..36: mol_type = other RNA
aacctgatcgacaccattacaggcatgcacagcgtg

SEQ ID NO: 74920 - RNA, 27 nt, synthetic construct
  misc_feature 1..27: note = Glutathione S-transferase Mu 2 (180-188)
  source 1..27: mol_type = other RNA
aacctgaaggacttcatcagcagattt

SEQ ID NO: 74921 - RNA, 27 nt, synthetic construct
  misc_feature 1..27: note = SAM and SH3 domain-containing protein 1 (646-654)
  source 1..27: mol_type = other RNA
aacctgaaggagcacatgcccaccttc

SEQ ID NO: 74922 - RNA, 27 nt, synthetic construct
  misc_feature 1..27: note = Abelson tyrosine-protein kinase 2 (353-361)
  source 1..27: mol_type = other RNA
aacctgctcgactaccttagagagtgc

SEQ ID NO: 74923 - RNA, 39 nt, synthetic construct
  misc_feature 1..39: note = Multidrug resistance-associated protein 7 (339-351)
  source 1..39: mol_type = other RNA
aacctgctcggcaccgacagcgagagacttctgaatttc

SEQ ID NO: 74924 - RNA, 30 nt, synthetic construct
  misc_feature 1..30: note = Catenin alpha-1 (815-824)
  source 1..30: mol_type = other RNA
aacctgatgaatgccgtggtccagaccgtt

SEQ ID NO: 74925 - RNA, 33 nt, synthetic construct
  misc_feature 1..33: note = Small glutamine-rich tetratricopeptide repeat-containing protein alpha (236-246)
  source 1..33: mol_type = other RNA
aacctgatgaataacccccagatccaacagctc

SEQ ID NO: 74926 - RNA, 24 nt, synthetic construct
  misc_feature 1..24: note = Leucine-rich repeat-containing protein 4C (125-132)
  source 1..24: mol_type = other RNA
aacctgaataccctcgagcttttc

SEQ ID NO: 74927 - RNA, 27 nt, synthetic construct
  misc_feature 1..27: note = N-terminal Xaa-Pro-Lys N-methyltransferase 1 (210-218)
  source 1..27: mol_type = other RNA
aacctgcccgacgagatctaccacgtg

SEQ ID NO: 74928 - RNA, 30 nt, synthetic construct
  misc_feature 1..30: note = N-terminal Xaa-Pro-Lys N-methyltransferase 1 (210-219)
  source 1..30: mol_type = other RNA
aacctgcccgacgagatctaccacgtgtat

SEQ ID NO: 74929 - RNA, 27 nt, synthetic construct
  misc_feature 1..27: note = DNA repair protein RAD51 homolog 3 (205-213)
  source 1..27: mol_type = other RNA
aacctgagagacctcgagatccttctg

SEQ ID NO: 74930 - RNA, 27 nt, synthetic construct
  misc_feature 1..27: note = MIT domain-containing protein 1 (60-68)
  source 1..27: mol_type = other RNA
aacctgagagagaagatcagcaaatac

SEQ ID NO: 74931 - RNA, 27 nt, synthetic construct
  misc_feature 1..27: note = Negative regulator of reactive oxygen species (622-630)
  source 1..27: mol_type = other RNA
aacctgagctccaagatcattagagtg

SEQ ID NO: 74932 - RNA, 33 nt, synthetic construct
  misc_feature 1..33: note = Galectin-3-binding protein (51-61)
  source 1..33: mol_type = other RNA
aacctgtgggacctcaccgatgccagcgtggtc

SEQ ID NO: 74933 - RNA, 27 nt, synthetic construct
  misc_feature 1..27: note = 2'-5'-oligoadenylate synthase 3 (990-998)
  source 1..27: mol_type = other RNA
aacatggccgagggcttcagaaccgtg

SEQ ID NO: 74934 - RNA, 27 nt, synthetic construct
  misc_feature 1..27: note = X-ray repair cross-complementing protein 5 (410-418)
  source 1..27: mol_type = other RNA
aacatgctgaatccccctgccgaggtg

SEQ ID NO: 74935 - RNA, 27 nt, synthetic construct
  misc_feature 1..27: note = Heterogeneous nuclear ribonucleoprotein H (351-359)
  source 1..27: mol_type = other RNA
aacatgcagcacagatacgtggagctg

SEQ ID NO: 74936 - RNA, 27 nt, synthetic construct
  misc_feature 1..27: note = Monocarboxylate transporter 7 (86-94)
  source 1..27: mol_type = other RNA
aacagattcggccacaggctggtggtc

SEQ ID NO: 74937 - RNA, 27 nt, synthetic construct
  misc_feature 1..27: note = Leucine-rich repeat-containing protein C10orf11 (190-198)
  source 1..27: mol_type = other RNA
aacagattcatcagggacgatcagctg

SEQ ID NO: 74938 - RNA, 24 nt, synthetic construct
  misc_feature 1..24: note = Proteasome subunit beta type-4 (230-237)
  source 1..24: mol_type = other RNA
aacagattccagatcgccaccgtg

SEQ ID NO: 74939 - RNA, 27 nt, synthetic construct
  misc_feature 1..27: note = Vacuolar protein sorting-associated protein 16 homolog (30-38)
  source 1..27: mol_type = other RNA
aacagaggcgacttctttatgaccctg

SEQ ID NO: 74940 - RNA, 27 nt, synthetic construct
  misc_feature 1..27: note = Transcription factor MafF (38-46)
  source 1..27: mol_type = other RNA
aacagacacctgaggggcctcagcgcc

SEQ ID NO: 74941 - RNA, 27 nt, synthetic construct
  misc_feature 1..27: note = RNA polymerase-associated protein RTF1 homolog (202-210)
  source 1..27: mol_type = other RNA
aacagaatcgagaagagggaagtgctg

SEQ ID NO: 74942 - RNA, 24 nt, synthetic construct
  misc_feature 1..24: note = Catenin beta-1 (586-593)
  source 1..24: mol_type = other RNA
aacagaatcgtgattaggggcctg

SEQ ID NO: 74943 - RNA, 27 nt, synthetic construct
  misc_feature 1..27: note = Zinc finger and BTB domain-containing protein 38 (384-392)
  source 1..27: mol_type = other RNA
aacagactggacaggcacgagcagatc

SEQ ID NO: 74944 - RNA, 27 nt, synthetic construct
  misc_feature 1..27: note = 40S ribosomal protein S24 (15-23)
  source 1..27: mol_type = other RNA
aacagactgctccagaggaagcaaatg

SEQ ID NO: 74945 - RNA, 24 nt, synthetic construct
  misc_feature 1..24: note = Cytoplasmic FMR1-interacting protein 1 (839-846)
  source 1..24: mol_type = other RNA
aacagaatgacccacaagctgctc

SEQ ID NO: 74946 - RNA, 27 nt, synthetic construct
  misc_feature 1..27: note = Transcription initiation factor IIA subunit 2 (54-62)
  source 1..27: mol_type = other RNA
aacagagtgaatttcaggggcagcctg

SEQ ID NO: 74947 - RNA, 27 nt, synthetic construct
  misc_feature 1..27: note = Pseudouridine-5'-phosphatase (35-43)
  source 1..27: mol_type = other RNA
aacagatacgacaagaaatatagctgg

SEQ ID NO: 74948 - RNA, 39 nt, synthetic construct
  misc_feature 1..39: note = Ribonucleoside-diphosphate reductase large subunit (35-47)
  source 1..39: mol_type = other RNA
aacagcgccatcatttacgacagagatttctcctataat

SEQ ID NO: 74949 - RNA, 27 nt, synthetic construct
  misc_feature 1..27: note = Rho-related BTB domain-containing protein 3 (241-249)
  source 1..27: mol_type = other RNA
aacagcgacctgaataacctccttttc

SEQ ID NO: 74950 - RNA, 36 nt, synthetic construct
  misc_feature 1..36: note = SAM and SH3 domain-containing protein 1 (424-435)
  source 1..36: mol_type = other RNA
aacagcgaccccatgggcaaggagggggatttcgtg

SEQ ID NO: 74951 - RNA, 39 nt, synthetic construct
  misc_feature 1..39: note = SAM and SH3 domain-containing protein 1 (424-436)
  source 1..39: mol_type = other RNA
aacagcgaccccatgggcaaggagggggatttcgtgtac

SEQ ID NO: 74952 - RNA, 30 nt, synthetic construct
  misc_feature 1..30: note = Schlafen family member 5 (601-610)
  source 1..30: mol_type = other RNA
aacagcgacagaaaggcccagtccgtgtac

SEQ ID NO: 74953 - RNA, 33 nt, synthetic construct; identical to SEQ ID NO: 50726
  misc_feature 1..33: note = RELT-like protein 1 (113-123)
  source 1..33: mol_type = other RNA

SEQ ID NO: 74954 - RNA, 33 nt, synthetic construct
  misc_feature 1..33: note = Peptidyl-prolyl cis-trans isomerase FKBP9 (143-153)
  source 1..33: mol_type = other RNA
aacagcgaggaccaggtgcaaatccacacctac

SEQ ID NO: 74955 - RNA, 33 nt, synthetic construct
  misc_feature 1..33: note = Zinc finger protein 583 (85-95)
  source 1..33: mol_type = other RNA
aacagcgagttctcctctaagcaggaaacctac

SEQ ID NO: 74956 - RNA, 21 nt, synthetic construct
  misc_feature 1..21: note = Thymidylate synthase (205-211)
  source 1..21: mol_type = other RNA
aacagcgagctgtcctgccag

SEQ ID NO: 74957 - RNA, 27 nt, synthetic construct
  misc_feature 1..27: note = Zinc finger protein 280D (611-619)
  source 1..27: mol_type = other RNA
aacaccgccctgagaaatctcaggtac

SEQ ID NO: 74958 - RNA, 27 nt, synthetic construct
  misc_feature 1..27: note = DNA-directed RNA polymerase III subunit RPC10 (26-34)
  source 1..27: mol_type = other RNA
aacacctgcccctacgtgcacaatatc

SEQ ID NO: 74959 - RNA, 33 nt, synthetic construct
  misc_feature 1..33: note = Heterogeneous nuclear ribonucleoprotein L-like (153-163)
  source 1..33: mol_type = other RNA
aacaccgacgatcccagcggcgggaataaggtg

SEQ ID NO: 74960 - RNA, 30 nt, synthetic construct
  misc_feature 1..30: note = Ubiquitin-like protein 5 (19-28)
  source 1..30: mol_type = other RNA
aacaccgacgatacaatcggcgacctgaag

SEQ ID NO: 74961 - RNA, 27 nt, synthetic construct
  misc_feature 1..27: note = Lysosomal-trafficking regulator (2269-2277)
  source 1..27: mol_type = other RNA
aacaccgacgattgggagaatttcgcc

SEQ ID NO: 74962 - RNA, 27 nt, synthetic construct
  misc_feature 1..27: note = Serine/threonine-protein kinase 4 (95-103)
  source 1..27: mol_type = other RNA
aacaccgacctgtggatcgtgatggag

SEQ ID NO: 74963 - RNA, 54 nt, synthetic construct
  misc_feature 1..54: note = Selenoprotein O (185-202)
  source 1..54: mol_type = other RNA
aacaccgacaatatgagcatcctgggcctcacaattgattacgggcccttcgga

SEQ ID NO: 74964 - RNA, 30 nt, synthetic construct
  misc_feature 1..30: note = DNA-binding protein inhibitor ID-4 (141-150)
  source 1..30: mol_type = other RNA
aacaccgaccccgccggcgctgtgaataag

SEQ ID NO: 74965 - RNA, 30 nt, synthetic construct
  misc_feature 1..30: note = ADP-ribosylation factor-binding protein GGA2 (54-63)
  source 1..30: mol_type = other RNA
aacaccgaccccaatggccctacacacgcc

SEQ ID NO: 74966 - RNA, 27 nt, synthetic construct
  misc_feature 1..27: note = Phenylalanine-tRNA ligase beta subunit (486-494)
  source 1..27: mol_type = other RNA
aacaccgacgtgggcgccaagaattac

SEQ ID NO: 74967 - RNA, 27 nt, synthetic construct
  misc_feature 1..27: note = Fructose-bisphosphate aldolase A (51-59)
  source 1..27: mol_type = other RNA
aacaccgaggaaaatagaaggttctac

SEQ ID NO: 74968 - RNA, 27 nt, synthetic construct
  misc_feature 1..27: note = Fructose-bisphosphate aldolase C (85-93)
  source 1..27: mol_type = other RNA
aacaccgaggaaaatagaaggctgtac

SEQ ID NO: 74969 - RNA, 33 nt, synthetic construct
  misc_feature 1..33: note = Dynamin-1 (590-600)
  source 1..33: mol_type = other RNA
aacaccgagcagagaaatgtgtacaaggactat

SEQ ID NO: 74970 - RNA, 27 nt, synthetic construct
  misc_feature 1..27: note = Neuron navigator 2 (838-846)
  source 1..27: mol_type = other RNA
aacaccgagagcggcagatacgtgtat

SEQ ID NO: 74971 - RNA, 27 nt, synthetic construct
  misc_feature 1..27: note = WW domain-binding protein 2 (24-32)
  source 1..27: mol_type = other RNA
aacaccgagagcatcctgatgtcctac

SEQ ID NO: 74972 - RNA, 33 nt, synthetic construct
  misc_feature 1..33: note = Short/branched chain specific acyl-CoA dehydrogenase, mitochondrial (422-432)
  source 1..33: mol_type = other RNA
aacaccatcgccaagcacattgacgctgagtac

SEQ ID NO: 74973 - RNA, 36 nt, synthetic construct
  misc_feature 1..36: note = Mothers against decapentaplegic homolog 2 (91-102)
  source 1..36: mol_type = other RNA
aacaccatcgaccagtgggatacaactggcctgtac

SEQ ID NO: 74974 - RNA, 36 nt, synthetic construct
  misc_feature 1..36: note = CDK5 and ABL1 enzyme substrate 1 (7-18)
  source 1..36: mol_type = other RNA
aacaccatcgacagcacatcctctttctcacagttt

SEQ ID NO: 74975 - RNA, 27 nt, synthetic construct
  misc_feature 1..27: note = H(+)/Cl(-) exchange transporter 5 (18-26)
  source 1..27: mol_type = other RNA
aacaccatcgactgggtgagagagaag

SEQ ID NO: 74976 - RNA, 27 nt, synthetic construct
  misc_feature 1..27: note = Coiled-coil domain-containing protein 93 (523-531)
  source 1..27: mol_type = other RNA
aacaccctggacgataagaaagtgtac

SEQ ID NO: 74977 - RNA, 27 nt, synthetic construct
  misc_feature 1..27: note = COP9 signalosome complex subunit 6 (300-308)
  source 1..27: mol_type = other RNA
aacaccatgaatcagttcgtgaacaag

SEQ ID NO: 74978 - RNA, 27 nt, synthetic construct
  misc_feature 1..27: note = Protein FAM50A (156-164)
  source 1..27: mol_type = other RNA
aacaccatgcagcaattcctgcagaag

SEQ ID NO: 74979 - RNA, 27 nt, synthetic construct
  misc_feature 1..27: note = 26S proteasome non-ATPase regulatory subunit 8 (201-209)
  source 1..27: mol_type = other RNA
aacacccccaagaaaatgacagactac

SEQ ID NO: 74980 - RNA, 27 nt, synthetic construct
  misc_feature 1..27: note = G-protein coupled receptor 98 (3795-3803)
  source 1..27: mol_type = other RNA
aacaccacaactctgcagctccaaatc

SEQ ID NO: 74981 - RNA, 30 nt, synthetic construct; identical to SEQ ID NO: 50754
  misc_feature 1..30: note = Calsyntenin-1 (464-473)
  source 1..30: mol_type = other RNA

SEQ ID NO: 74982 - RNA, 36 nt, synthetic construct
  misc_feature 1..36: note = 39S ribosomal protein L2, mitochondrial (195-206)
  source 1..36: mol_type = other RNA
aacgtggagagcgaacccggcagaggggcccagtac

SEQ ID NO: 74983 - RNA, 33 nt, synthetic construct
  misc_feature 1..33: note = Geranylgeranyl transferase type-2 subunit beta (112-122)
  source 1..33: mol_type = other RNA
aacgtgatcgacgtcaataaggttgtggagtac

SEQ ID NO: 74984 - RNA, 33 nt, synthetic construct
  misc_feature 1..33: note = Zinc finger protein 638 (207-217)
  source 1..33: mol_type = other RNA
aacgtgatcgactacggccacgccagcaagtat

SEQ ID NO: 74985 - RNA, 30 nt, synthetic construct
  misc_feature 1..30: note = Neuropathy target esterase (1252-1261)
  source 1..30: mol_type = other RNA
aacgtgatcgagaagatgctgaccgacaga

SEQ ID NO: 74986 - RNA, 30 nt, synthetic construct
  misc_feature 1..30: note = Protein MMS22-like (799-808)
  source 1..30: mol_type = other RNA
aacgtgatcgagcagtacattggcagattc

SEQ ID NO: 74987 - RNA, 27 nt, synthetic construct
  misc_feature 1..27: note = Syndetin (606-614)
  source 1..27: mol_type = other RNA
aacgtgatcagactggtcggcaagtac

SEQ ID NO: 74988 - RNA, 27 nt, synthetic construct
  misc_feature 1..27: note = tRNA (guanine(37)-N1)-methyltransferase (163-171)
  source 1..27: mol_type = other RNA
aacgtgagcccccagatctccaagtac

SEQ ID NO: 74989 - RNA, 33 nt, synthetic construct
  misc_feature 1..33: note = Probable crossover junction endonuclease EME2 (356-366)
  source 1..33: mol_type = other RNA
cccgacctgagcagaaggatctgcctcttcctt

SEQ ID NO: 74990 - RNA, 33 nt, synthetic construct
  misc_feature 1..33: note = Neuronal acetylcholine receptor subunit alpha-3 (433-443)
  source 1..33: mol_type = other RNA
cccgagatcaaggaagccattcagagcgtgaaa

SEQ ID NO: 74991 - RNA, 27 nt, synthetic construct
  misc_feature 1..27: note = Ribosomal L1 domain-containing protein 1 (244-252)
  source 1..27: mol_type = other RNA
cccgagaagtgggaaagcgtgaaactg

SEQ ID NO: 74992 - RNA, 27 nt, synthetic construct
  misc_feature 1..27: note = Galectin-3 (191-199)
  source 1..27: mol_type = other RNA
cccttcgagagcggcaagccttttaaa

SEQ ID NO: 74993 - RNA, 33 nt, synthetic construct
  misc_feature 1..33: note = 40S ribosomal protein S19 (2-12)
  source 1..33: mol_type = other RNA
cccggcgtgaccgtcaaggacgttaaccagcaa

SEQ ID NO: 74994 - RNA, 24 nt, synthetic construct
  misc_feature 1..24: note = Carbohydrate sulfotransferase 5 (259-266)
  source 1..24: mol_type = other RNA
ccccacctgagactcatcagggag

SEQ ID NO: 74995 - RNA, 30 nt, synthetic construct
  misc_feature 1..30: note = Myosin regulatory light chain 12A (152-161)
  source 1..30: mol_type = other RNA
cccatcgacaagaaaggcaacttcaattac

SEQ ID NO: 74996 - RNA, 33 nt, synthetic construct
  misc_feature 1..33: note = A-kinase anchor protein 11 (107-117)
  source 1..33: mol_type = other RNA
cccctggacatcagctccgatcctctcaaccag

SEQ ID NO: 74997 - RNA, 27 nt, synthetic construct
  misc_feature 1..27: note = SYTL2 protein (325-333)
  source 1..27: mol_type = other RNA
cccctgagaatgctccttatcgccaag

SEQ ID NO: 74998 - RNA, 33 nt, synthetic construct
  misc_feature 1..33: note = Titin (13404-13414)
  source 1..33: mol_type = other RNA
ccccctgtggaggaaagagagatcgaaaagtac

SEQ ID NO: 74999 - RNA, 27 nt, synthetic construct
  misc_feature 1..27: note = Translation initiation factor eIF-2B subunit delta (205-213)
  source 1..27: mol_type = other RNA
ccccagtacagcagacaaaactccctg

SEQ ID NO: 75000 - RNA, 27 nt, synthetic construct
  misc_feature 1..27: note = Ubiquitin-associated protein 2-like (957-965)
  source 1..27: mol_type = other RNA
cccagcggctacgggtcccacggatat

SEQ ID NO: 75001 - RNA, 36 nt, synthetic construct
  misc_feature 1..36: note = Enhancer of filamentation 1 (121-132)
  source 1..36: mol_type = other RNA
cccaccggccacgggacacaggagcaagaagtgtac

SEQ ID NO: 75002 - RNA, 36 nt, synthetic construct
  misc_feature 1..36: note = Phosphatidylethanolamine-binding protein 1 (2-13)
  source 1..36: mol_type = other RNA
cccgtggacctgagcaagtggtccggccctctctct

SEQ ID NO: 75003 - RNA, 27 nt, synthetic construct
  misc_feature 1..27: note = DNA ligase 3 (547-555)
  source 1..27: mol_type = other RNA
caggccttccccggcgggcacagcatg

SEQ ID NO: 75004 - RNA, 27 nt, synthetic construct
  misc_feature 1..27: note = E3 ubiquitin-protein ligase BRE1B (135-143)
  source 1..27: mol_type = other RNA
caggccggccccatcaacagagagatg

SEQ ID NO: 75005 - RNA, 27 nt, synthetic construct
  misc_feature 1..27: note = Tyrosine-protein phosphatase non-receptor type 20 (25-33)
  source 1..27: mol_type = other RNA
caggccctgagccccctcctttccgtg

SEQ ID NO: 75006 - RNA, 27 nt, synthetic construct
  misc_feature 1..27: note = Importin subunit beta-1 (408-416)
  source 1..27: mol_type = other RNA
caggccatgcccaccctgatcgagctc

SEQ ID NO: 75007 - RNA, 30 nt, synthetic construct
  misc_feature 1..30: note = UBX domain-containing protein 6 (85-94)
  source 1..30: mol_type = other RNA
caggaggaccccgaagagttctacgtgctg

SEQ ID NO: 75008 - RNA, 24 nt, synthetic construct
  misc_feature 1..24: note = Spectrin beta chain, non-erythrocytic 5 (1672-1679)
  source 1..24: mol_type = other RNA
caggaggaactggccatctactgg

SEQ ID NO: 75009 - RNA, 39 nt, synthetic construct
  misc_feature 1..39: note = Growth/differentiation factor 15 (4-16)
  source 1..39: mol_type = other RNA
caggagctgagaaccgtgaacggcagccaaatgctcctt

SEQ ID NO: 75010 - RNA, 30 nt, synthetic construct
  misc_feature 1..30: note = Ethanolamine kinase 1 (326-335)
  source 1..30: mol_type = other RNA
cagttcatcgactacgagtatagcggctac

SEQ ID NO: 75011 - RNA, 30 nt, synthetic construct
  misc_feature 1..30: note = Leucine-rich repeat-containing protein 15 (122-131)
  source 1..30: mol_type = other RNA
cagggcctggacagcctcgagtcccttctg

SEQ ID NO: 75012 - RNA, 30 nt, synthetic construct; identical to SEQ ID NO: 50785
  misc_feature 1..30: note = Methyltransferase-like protein 25 (467-476)
  source 1..30: mol_type = other RNA

SEQ ID NO: 75013 - RNA, 27 nt, synthetic construct
  misc_feature 1..27: note = Nuclear migration protein nudC (20-28)
  source 1..27: mol_type = other RNA
cagcacgagggcggggtgcaagaactg

SEQ ID NO: 75014 - RNA, 27 nt, synthetic construct
  misc_feature 1..27: note = Threonine-tRNA ligase, cytoplasmic (535-543)
  source 1..27: mol_type = other RNA
cagatcaaggacgccattggcagatac

SEQ ID NO: 75015 - RNA, 27 nt, synthetic construct
  misc_feature 1..27: note = Cytoplasmic dynein 1 heavy chain 1 (2212-2220)
  source 1..27: mol_type = other RNA
cagatcacccaaattaaccacggcctg

SEQ ID NO: 75016 - RNA, 36 nt, synthetic construct
  misc_feature 1..36: note = Importin-8 (185-196)
  source 1..36: mol_type = other RNA
cagatcgtgcaactgctccccgacagctcctactat

SEQ ID NO: 75017 - RNA, 30 nt, synthetic construct
  misc_feature 1..30: note = Histone-lysine N-methyltransferase SUV39H1 (268-277)
  source 1..30: mol_type = other RNA
cagatctacgacagacaaggcgccacctat

SEQ ID NO: 75018 - RNA, 27 nt, synthetic construct
  misc_feature 1..27: note = PH and SEC7 domain-containing protein 3 (214-222)
  source 1..27: mol_type = other RNA
cagaaggacctgaccgccctccttaca

SEQ ID NO: 75019 - RNA, 27 nt, synthetic construct
  misc_feature 1..27: note = Zinc finger and BTB domain-containing protein 37 (95-103)
  source 1..27: mol_type = other RNA
cagctggccgacatcattagctacctc

SEQ ID NO: 75020 - RNA, 27 nt, synthetic construct
  misc_feature 1..27: note = Protein FAM98B (139-147)
  source 1..27: mol_type = other RNA
cagctggacaagaacagcgaggtgtac

SEQ ID NO: 75021 - RNA, 30 nt, synthetic construct
  misc_feature 1..30: note = Calsyntenin-1 (952-961)
  source 1..30: mol_type = other RNA
cagctggagtgggacgatagcaccctctcc

SEQ ID NO: 75022 - RNA, 27 nt, synthetic construct
  misc_feature 1..27: note = Poly (ADP-ribose) polymerase 4 (351-359)
  source 1..27: mol_type = other RNA
cagctgatcagagacatggtgaacgtc

SEQ ID NO: 75023 - RNA, 27 nt, synthetic construct
  misc_feature 1..27: note = Rap guanine nucleotide exchange factor 6 (270-278)
  source 1..27: mol_type = other RNA
cagctgctcgagttcatgcaccaactt

SEQ ID NO: 75024 - RNA, 27 nt, synthetic construct
  misc_feature 1..27: note = Probable dimethyladenosine transferase (249-257)
  source 1..27: mol_type = other RNA
cagctgctcgagaagaactacagaatc

SEQ ID NO: 75025 - RNA, 33 nt, synthetic construct
  misc_feature 1..33: note = 26S proteasome non-ATPase regulatory subunit 6 (306-316)
  source 1..33: mol_type = other RNA
cagctgctcgagagctacagatcccttaccctg

SEQ ID NO: 75026 - RNA, 27 nt, synthetic construct
  misc_feature 1..27: note = Chromosome-associated kinesin KIF4A (982-990)
  source 1..27: mol_type = other RNA
cagctgctcagagagaacgaaatcatt

SEQ ID NO: 75027 - RNA, 33 nt, synthetic construct
  misc_feature 1..33: note = Voltage-gated potassium channel subunit beta-2 (329-339)
  source 1..33: mol_type = other RNA
cagctgatggagaacatcggcgccattcaagtg

SEQ ID NO: 75028 - RNA, 27 nt, synthetic construct
  misc_feature 1..27: note = Chromatin assembly factor 1 subunit B (113-121)
  source 1..27: mol_type = other RNA
cagctgaacaaggagaattggaccgtg

SEQ ID NO: 75029 - RNA, 27 nt, synthetic construct
  misc_feature 1..27: note = Transcription activator BRG1 (179-187)
  source 1..27: mol_type = other RNA
cagctgagagcccaaatcatggcttac

SEQ ID NO: 75030 - RNA, 27 nt, synthetic construct
  misc_feature 1..27: note = Nuclear factor erythroid 2-related factor 1 (321-329)
  source 1..27: mol_type = other RNA
cagctgagcgaggcccaactctccctt

SEQ ID NO: 75031 - RNA, 27 nt, synthetic construct
  misc_feature 1..27: note = Protein AHNAK2 (5375-5383)
  source 1..27: mol_type = other RNA
cagctgtgggaggacagcgtgctcacc

SEQ ID NO: 75032 - RNA, 27 nt, synthetic construct
  misc_feature 1..27: note = Alpha-2-macroglobulin receptor-associated protein (61-69)
  source 1..27: mol_type = other RNA
cagctgtgggagaaggcccaaagactc

SEQ ID NO: 75033 - RNA, 27 nt, synthetic construct
  misc_feature 1..27: note = Lysine-specific histone demethylase 1A (239-247)
  source 1..27: mol_type = other RNA
cagctgtggctcgacaaccccaagatc

SEQ ID NO: 75034 - RNA, 30 nt, synthetic construct; identical to SEQ ID NO: 50807
  misc_feature 1..30: note = YrdC domain-containing protein, mitochondrial (184-193)
  source 1..30: mol_type = other RNA

SEQ ID NO: 75035 - RNA, 27 nt, synthetic construct
  misc_feature 1..27: note = U3 small nucleolar RNA-associated protein 14 homolog A (505-513)
  source 1..27: mol_type = other RNA
cagatgatcgacctgcaaaacctcctt

SEQ ID NO: 75036 - RNA, 27 nt, synthetic construct
  misc_feature 1..27: note = Sodium/myo-inositol cotransporter (686-694)
  source 1..27: mol_type = other RNA
cagatgctggaggaaaccagacaagtg

SEQ ID NO: 75037 - RNA, 33 nt, synthetic construct
  misc_feature 1..33: note = Neuroblastoma-amplified sequence (2232-2242)
  source 1..33: mol_type = other RNA
cagatgctgcccgccgagggcgtgaaggaactc

SEQ ID NO: 75038 - RNA, 27 nt, synthetic construct
  misc_feature 1..27: note = Vimentin (343-351)
  source 1..27: mol_type = other RNA
cagatgagagagatggaagagaacttc

SEQ ID NO: 75039 - RNA, 27 nt, synthetic construct
  misc_feature 1..27: note = Transmembrane emp24 domain-containing protein 4 (59-67)
  source 1..27: mol_type = other RNA
cagatgtgggacaagcaaaaagaggtg

SEQ ID NO: 75040 - RNA, 27 nt, synthetic construct
  misc_feature 1..27: note = G protein-coupled receptor SNSR1 (285-293)
  source 1..27: mol_type = other RNA
cagaacctgaagctcgtgcttcaaaaa

SEQ ID NO: 75041 - RNA, 27 nt, synthetic construct
  misc_feature 1..27: note = DNA-directed RNA polymerase I subunit RPA2 (30-38)
  source 1..27: mol_type = other RNA
cagcaaaaggccgctctgcaggagctc

SEQ ID NO: 75042 - RNA, 27 nt, synthetic construct
  misc_feature 1..27: note = Histone-lysine N-methyltransferase 2C (1225-1233)
  source 1..27: mol_type = other RNA
cagcaacagcagcagcaacagcagttc

SEQ ID NO: 75043 - RNA, 27 nt, synthetic construct
  misc_feature 1..27: note = Synaptosomal-associated protein 29 (42-50)
  source 1..27: mol_type = other RNA
cagcaatacctgagacaggaggtgctc

SEQ ID NO: 75044 - RNA, 36 nt, synthetic construct
  misc_feature 1..36: note = Vimentin (195-206)
  source 1..36: mol_type = other RNA
cagagagaggaagccgagaacaccctgcaaagcttc

SEQ ID NO: 75045 - RNA, 27 nt, synthetic construct
  misc_feature 1..27: note = Very long-chain specific acyl-CoA dehydrogenase, mitochondrial (600-608)
  source 1..27: mol_type = other RNA
cagagcgacccctggcaacaggagctg

SEQ ID NO: 75046 - RNA, 30 nt, synthetic construct
  misc_feature 1..30: note = Neuropilin-2 (690-699)
  source 1..30: mol_type = other RNA
cagagcgactcccaaagagagggccagtac

SEQ ID NO: 75047 - RNA, 27 nt, synthetic construct
  misc_feature 1..27: note = Kelch-like protein 42 (26-34)
  source 1..27: mol_type = other RNA
cagagcgactacttcagagccctgtat

SEQ ID NO: 75048 - RNA, 33 nt, synthetic construct
  misc_feature 1..33: note = HLA class I histocompatibility antigen, B-8 alpha chain (111-121)
  source 1..33: mol_type = other RNA
cagagcgaggccggctcccacaccctgcaatct

SEQ ID NO: 75049 - RNA, 39 nt, synthetic construct
  misc_feature 1..39: note = HLA class I histocompatibility antigen, A-66 alpha chain (86-98)
  source 1..39: mol_type = other RNA
cagagcgaggacggctcccacaccatccaaagaatgtac

SEQ ID NO: 75050 - RNA, 42 nt, synthetic construct
  misc_feature 1..42: note = Cold-inducible RNA-binding protein (147-160)
  source 1..42: mol_type = other RNA
cagagcggcgggtactccgacagatcttcaggaggtagttat

SEQ ID NO: 75051 - RNA, 39 nt, synthetic construct
  misc_feature 1..39: note = Caprin-1 (653-665)
  source 1..39: mol_type = other RNA
cagagccaattctccgcccccagagactactctggctat

SEQ ID NO: 75052 - RNA, 30 nt, synthetic construct
  misc_feature 1..30: note = Zinc finger and BTB domain-containing protein 17 (685-694)
  source 1..30: mol_type = other RNA
cagaccgacgccgatttctaccaacagtat

SEQ ID NO: 75053 - RNA, 27 nt, synthetic construct
  misc_feature 1..27: note = RNA polymerase-associated protein CTR9 homolog (424-432)
  source 1..27: mol_type = other RNA
cagaccgacatccaaggcgccctgagc

SEQ ID NO: 75054 - RNA, 30 nt, synthetic construct
  misc_feature 1..30: note = Glia-derived nexin (301-310)
  source 1..30: mol_type = other RNA
cagaccgacctgaaggagcccctcaaagtg

SEQ ID NO: 75055 - RNA, 33 nt, synthetic construct
  misc_feature 1..33: note = Calreticulin (119-129)
  source 1..33: mol_type = other RNA
cagaccgacatgcacggcgatagcgagtacaac

SEQ ID NO: 75056 - RNA, 27 nt, synthetic construct
  misc_feature 1..27: note = Intraflagellar transport protein 172 homolog (85-93)
  source 1..27: mol_type = other RNA
cagaccgacaacatcatttacgtgtat

SEQ ID NO: 75057 - RNA, 30 nt, synthetic construct
  misc_feature 1..30: note = Putative E3 ubiquitin-protein ligase UNKL (18-27)
  source 1..30: mol_type = other RNA
cagaccgagaagcccacacactacagatat

SEQ ID NO: 75058 - RNA, 30 nt, synthetic construct
  misc_feature 1..30: note = Zinc finger protein 217 (667-676)
  source 1..30: mol_type = other RNA
cagaccgagacagccgctgactgcagatac

SEQ ID NO: 75059 - RNA, 27 nt, synthetic construct
  misc_feature 1..27: note = Interleukin-13 receptor subunit alpha-1 (268-276)
  source 1..27: mol_type = other RNA
cagaccgagacacacaacgtgttctac

SEQ ID NO: 75060 - RNA, 27 nt, synthetic construct
  misc_feature 1..27: note = Centrosomal protein of 295 kDa (745-753)
  source 1..27: mol_type = other RNA
cagaccgagacacaacagagagactac

SEQ ID NO: 75061 - RNA, 27 nt, synthetic construct
  misc_feature 1..27: note = Basic leucine zipper and W2 domain-containing protein 1 (165-173)
  source 1..27: mol_type = other RNA
cagaccatcggcgccagaaaggagctg

SEQ ID NO: 75062 - RNA, 27 nt, synthetic construct
  misc_feature 1..27: note = Ubiquitin carboxyl-terminal hydrolase 32 (111-119)
  source 1..27: mol_type = other RNA
cagaccatcaaggagattcacgaatac

SEQ ID NO: 75063 - RNA, 30 nt, synthetic construct
  misc_feature 1..30: note = Zinc fingers and homeoboxes protein 3 (607-616)
  source 1..30: mol_type = other RNA
cagacccccgacttcacacctactaagtac

SEQ ID NO: 75064 - RNA, 33 nt, synthetic construct
  misc_feature 1..33: note = Glycerol-3-phosphate dehydrogenase 1-like protein (226-236)
  source 1..33: mol_type = other RNA
cagaccagcgccgaggtgtacagaatcctgaag

SEQ ID NO: 75065 - RNA, 27 nt, synthetic construct
  misc_feature 1..27: note = Probable ATP-dependent RNA helicase DDX47 (228-236)
  source 1..27: mol_type = other RNA
cagaccgtggagaagctgcaacagtac

SEQ ID NO: 75066 - RNA, 30 nt, synthetic construct; identical to SEQ ID NO: 50839
  misc_feature 1..30: note = WD repeat-containing protein 62 (147-156)
  source 1..30: mol_type = other RNA

SEQ ID NO: 75067 - RNA, 30 nt, synthetic construct
  misc_feature 1..30: note = Ran GTPase-activating protein 1 (17-26)
  source 1..30: mol_type = other RNA
caggtggccggcgggcaactgagcttcaag

SEQ ID NO: 75068 - RNA, 27 nt, synthetic construct
  misc_feature 1..27: note = Pre-mRNA-processing factor 19 (209-217)
  source 1..27: mol_type = other RNA
caggtggccagccacgtcggcctgcat

SEQ ID NO: 75069 - RNA, 33 nt, synthetic construct
  misc_feature 1..33: note = Rootletin (1601-1611)
  source 1..33: mol_type = other RNA
caggtggccaccctggagagaagcctccaagct

SEQ ID NO: 75070 - RNA, 36 nt, synthetic construct
  misc_feature 1..36: note = Tripartite motif-containing protein 2 (694-705)
  source 1..36: mol_type = other RNA
caggtgttcgacggcagcgggtcctttctgtcttac

SEQ ID NO: 75071 - RNA, 30 nt, synthetic construct
  misc_feature 1..30: note = Basic leucine zipper and W2 domain-containing protein 2 (113-122)
  source 1..30: mol_type = other RNA
caggtgttcaacaagctgatcagaaggtac

SEQ ID NO: 75072 - RNA, 30 nt, synthetic construct
  misc_feature 1..30: note = Sec1 family domain-containing protein 2 (210-219)
  source 1..30: mol_type = other RNA
caggtgatcgccgctgacctggcaaactac

SEQ ID NO: 75073 - RNA, 33 nt, synthetic construct
  misc_feature 1..33: note = Putative Polycomb group protein ASXL1 (36-46)
  source 1..33: mol_type = other RNA
caggtgatcgaggccgaaggcctgaaggagatg

SEQ ID NO: 75074 - RNA, 33 nt, synthetic construct
  misc_feature 1..33: note = SURP and G-patch domain-containing protein 2 (69-79)
  source 1..33: mol_type = other RNA
caggtgatcggccacagaaagctggggcatttc

SEQ ID NO: 75075 - RNA, 27 nt, synthetic construct
  misc_feature 1..27: note = Vimentin (453-461)
  source 1..27: mol_type = other RNA
caggtgatcaacgagaccagccaacac

SEQ ID NO: 75076 - RNA, 30 nt, synthetic construct
  misc_feature 1..30: note = Vimentin (453-462)
  source 1..30: mol_type = other RNA
caggtgatcaacgagaccagccaacaccat

SEQ ID NO: 75077 - RNA, 36 nt, synthetic construct
  misc_feature 1..36: note = Vimentin (453-464)
  source 1..36: mol_type = other RNA
caggtgatcaacgagaccagccaacaccatgacgat

SEQ ID NO: 75078 - RNA, 27 nt, synthetic construct
  misc_feature 1..27: note = Splicing factor U2AF 65 kDa subunit (274-282)
  source 1..27: mol_type = other RNA
caggtgaaggagctgctcaccagcttc

SEQ ID NO: 75079 - RNA, 27 nt, synthetic construct
  misc_feature 1..27: note = Glutathione-specific gamma-glutamylcyclotransferase 1 (98-106)
  source 1..27: mol_type = other RNA
caggtgcaaggcgagcaggtcagcaag

SEQ ID NO: 75080 - RNA, 30 nt, synthetic construct
  misc_feature 1..30: note = tRNA-splicing ligase RtcB homolog (232-241)
  source 1..30: mol_type = other RNA
caggtggtcgacgagatcttcaacgaatac

SEQ ID NO: 75081 - RNA, 30 nt, synthetic construct
  misc_feature 1..30: note = Xylulose kinase (511-520)
  source 1..30: mol_type = other RNA
caggtgtacgaggccctgctcccccaatat

SEQ ID NO: 75082 - RNA, 30 nt, synthetic construct
  misc_feature 1..30: note = 2'-5'-oligoadenylate synthase 3 (908-917)
  source 1..30: mol_type = other RNA
caggtgtacgtcgacctgatccacagctat

SEQ ID NO: 75083 - RNA, 27 nt, synthetic construct
  misc_feature 1..27: note = FERM domain-containing protein 8 (28-36)
  source 1..27: mol_type = other RNA
agagccgctgacgtgctggtctacctc

SEQ ID NO: 75084 - RNA, 27 nt, synthetic construct
  misc_feature 1..27: note = Non-canonical poly(A) RNA polymerase PAPD7 (152-160)
  source 1..27: mol_type = other RNA
agagccgctgagttcatcaagaactac

SEQ ID NO: 75085 - RNA, 27 nt, synthetic construct
  misc_feature 1..27: note = Nuclear export mediator factor NEMF (136-144)
  source 1..27: mol_type = other RNA
agagccgctgagcccctgctcaccctt

SEQ ID NO: 75086 - RNA, 39 nt, synthetic construct
  misc_feature 1..39: note = Non-POU domain-containing octamer-binding protein (367-379)
  source 1..39: mol_type = other RNA
agagccgctcccggcgcagagttcgcccctaacaagagg

SEQ ID NO: 75087 - RNA, 33 nt, synthetic construct
  misc_feature 1..33: note = Fatty acid synthase (2275-2285)
  source 1..33: mol_type = other RNA
agagccgctcccctggacagcatccactccctc

SEQ ID NO: 75088 - RNA, 30 nt, synthetic construct
  misc_feature 1..30: note = Sodium/potassium-transporting ATPase subunit alpha-3 (42-51)
  source 1..30: mol_type = other RNA
agagccgctgtgcccgacgcagtcggcaag

SEQ ID NO: 75089 - RNA, 27 nt, synthetic construct
  misc_feature 1..27: note = Nuclear pore complex protein Nup205 (413-421)
  source 1..27: mol_type = other RNA
agagccgacgaggatgctaggatgatc

SEQ ID NO: 75090 - RNA, 27 nt, synthetic construct
  misc_feature 1..27: note = Uncharacterized protein KIAA0930 (312-320)
  source 1..27: mol_type = other RNA
agagccgacggcaacttcctgctctac

SEQ ID NO: 75091 - RNA, 27 nt, synthetic construct
  misc_feature 1..27: note = Cytochrome b-c1 complex subunit 9 (34-42)
  source 1..27: mol_type = other RNA
agagccttcgaccagggcgctgatgca

SEQ ID NO: 75092 - RNA, 33 nt, synthetic construct
  misc_feature 1..33: note = E3 ubiquitin-protein ligase DTX3L (679-689)
  source 1..33: mol_type = other RNA
agagccttcgaccagaagctgatctttaccgtg

SEQ ID NO: 75093 - RNA, 27 nt, synthetic construct
  misc_feature 1..27: note = Protein transport protein Sec16A (1122-1130)
  source 1..27: mol_type = other RNA
agagccttccccggccctctggctaag

SEQ ID NO: 75094 - RNA, 30 nt, synthetic construct
  misc_feature 1..30: note = Protein ECT2 (107-116)
  source 1..30: mol_type = other RNA
agagccttcagcttttccaagacccccaaa

SEQ ID NO: 75095 - RNA, 27 nt, synthetic construct
  misc_feature 1..27: note = Rho GTPase-activating protein 11B (16-24)
  source 1..27: mol_type = other RNA
agagccttctacggcatcaaggtgaaa

SEQ ID NO: 75096 - RNA, 33 nt, synthetic construct
  misc_feature 1..33: note = Glutaminyl-peptide cyclotransferase (172-182)
  source 1..33: mol_type = other RNA
agagccctggacaagaaactccttagcctgaag

SEQ ID NO: 75097 - RNA, 27 nt, synthetic construct
  misc_feature 1..27: note = Clathrin heavy chain 1 (625-633)
  source 1..27: mol_type = other RNA
agagccctggagcacttcaccgacctc

SEQ ID NO: 75098 - RNA, 27 nt, synthetic construct
  misc_feature 1..27: note = Guanine nucleotide exchange factor DBS (926-934)
  source 1..27: mol_type = other RNA
agagccctggagcagagccaatccctc

SEQ ID NO: 75099 - RNA, 27 nt, synthetic construct
  misc_feature 1..27: note = ALX homeobox protein 1 (94-102)
  source 1..27: mol_type = other RNA
agagccatggacaactgcaatagcctg

SEQ ID NO: 75100 - RNA, 30 nt, synthetic construct
  misc_feature 1..30: note = Inositol hexakisphosphate kinase 2 (6-15)
  source 1..30: mol_type = other RNA
agagccatggacgtggagcccagggctaag

SEQ ID NO: 75101 - RNA, 27 nt, synthetic construct
  misc_feature 1..27: note = Hsp70-binding protein 1 (283-291)
  source 1..27: mol_type = other RNA
agagccatgcagcaacaggtgcagaag

SEQ ID NO: 75102 - RNA, 27 nt, synthetic construct
  misc_feature 1..27: note = Ankyrin-2 (388-396)
  source 1..27: mol_type = other RNA
agagccaaccccaatgctagggcactg

SEQ ID NO: 75103 - RNA, 39 nt, synthetic construct
  misc_feature 1..39: note = N-terminal kinase-like protein (673-685)
  source 1..39: mol_type = other RNA
agagccagccagtcccccaccggcgctgcagggaagctg

SEQ ID NO: 75104 - RNA, 27 nt, synthetic construct
  misc_feature 1..27: note = Retinoic acid receptor alpha (15-23)
  source 1..27: mol_type = other RNA
agagccaccagctccacacagtctctg

SEQ ID NO: 75105 - RNA, 27 nt, synthetic construct
  misc_feature 1..27: note = Coiled-coil domain-containing protein 124 (215-223)
  source 1..27: mol_type = other RNA
agagccgtgcccttcaacgctcctaag

SEQ ID NO: 75106 - RNA, 27 nt, synthetic construct
  misc_feature 1..27: note = Eukaryotic peptide chain release factor GTP-binding subunit ERF3A (143-151)
  source 1..27: mol_type = other RNA
agagcctacttcgagaccgaaaagaaa

SEQ ID NO: 75107 - RNA, 30 nt, synthetic construct
  misc_feature 1..30: note = CCR4-NOT transcription complex subunit 1 (1694-1703)
  source 1..30: mol_type = other RNA
agagcctacggcagcccctggtgcaacaag

SEQ ID NO: 75108 - RNA, 27 nt, synthetic construct
  misc_feature 1..27: note = E3 ubiquitin-protein ligase UBR5 (1124-1132)
  source 1..27: mol_type = other RNA
agagcctaccccgctgcaatcaccatt

SEQ ID NO: 75109 - RNA, 30 nt, synthetic construct
  misc_feature 1..30: note = SWI/SNF-related matrix-associated actin-dependent regulator of chromatin subfamily E member 1-related (135-144)
  source 1..30: mol_type = other RNA
agagcctaccagcaaagcgaggcttataag

SEQ ID NO: 75110 - RNA, 27 nt, synthetic construct
  misc_feature 1..27: note = Hermansky-Pudlak syndrome 3 protein (89-97)
  source 1..27: mol_type = other RNA
agagcctacgtgaactggaggaataag

SEQ ID NO: 75111 - RNA, 27 nt, synthetic construct
  misc_feature 1..27: note = 60S ribosomal protein L37 (21-29)
  source 1..27: mol_type = other RNA
agatgcggcagcaaggcctaccacctg

SEQ ID NO: 75112 - RNA, 42 nt, synthetic construct
  misc_feature 1..42: note = PEST proteolytic signal-containing nuclear protein (112-125)
  source 1..42: mol_type = other RNA
agagacacccccacaagcgccggccctaactccttcaataag

SEQ ID NO: 75113 - RNA, 30 nt, synthetic construct
  misc_feature 1..30: note = Nuclear mitotic apparatus protein 1 (76-85)
  source 1..30: mol_type = other RNA
agagaggccgaacagatgggcaacgagctg

SEQ ID NO: 75114 - RNA, 30 nt, synthetic construct
  misc_feature 1..30: note = Melanotransferrin (44-53)
  source 1..30: mol_type = other RNA
agagaggccggcatccagcccagcctgctc

SEQ ID NO: 75115 - RNA, 30 nt, synthetic construct
  misc_feature 1..30: note = Kinesin-like protein (353-362)
  source 1..30: mol_type = other RNA
agagaggccggcaacatcaatcagagcctg

SEQ ID NO: 75116 - RNA, 27 nt, synthetic construct
  misc_feature 1..27: note = Vacuolar protein sorting-associated protein 72 homolog (174-182)
  source 1..27: mol_type = other RNA
agagaggccaagatcaccgaagagctg

SEQ ID NO: 75117 - RNA, 27 nt, synthetic construct
  misc_feature 1..27: note = Src substrate cortactin (417-425)
  source 1..27: mol_type = other RNA
agagaggccagctcccagcaaggcctg

SEQ ID NO: 75118 - RNA, 33 nt, synthetic construct
  misc_feature 1..33: note = Cullin-4B (258-268)
  source 1..33: mol_type = other RNA
agagaggacagcctggattccgtgctcttcctt

SEQ ID NO: 75119 - RNA, 30 nt, synthetic construct
  misc_feature 1..30: note = Beta-citrylglutamate synthase B (18-27)
  source 1..30: mol_type = other RNA
agagaggactacccccagaaggaaatcctg

SEQ ID NO: 75120 - RNA, 30 nt, synthetic construct
  misc_feature 1..30: note = RE1-silencing transcription factor (872-881)
  source 1..30: mol_type = other RNA
agagaggaagccagcggcgaccagaagctg

SEQ ID NO: 75121 - RNA, 36 nt, synthetic construct
  misc_feature 1..36: note = 39S ribosomal protein L37, mitochondrial (242-253)
  source 1..36: mol_type = other RNA
agagaggaaatcgaggccaccaagaaccacgtgctg

SEQ ID NO: 75122 - RNA, 27 nt, synthetic construct
  misc_feature 1..27: note = ATP-dependent RNA helicase DHX36 (91-99)
  source 1..27: mol_type = other RNA
agagaggaacagatcgtgcaactgctc

SEQ ID NO: 75123 - RNA, 27 nt, synthetic construct
  misc_feature 1..27: note = 60S ribosomal protein L3-like (69-77)
  source 1..27: mol_type = other RNA
agagaggaagtggaggccgtcaccatc

SEQ ID NO: 75124 - RNA, 30 nt, synthetic construct
  misc_feature 1..30: note = Colorectal mutant cancer protein (584-593)
  source 1..30: mol_type = other RNA
agagagttcgaagtggagaccgaaaggctg

SEQ ID NO: 75125 - RNA, 33 nt, synthetic construct
  misc_feature 1..33: note = Proteasome subunit alpha type-7 (169-179)
  source 1..33: mol_type = other RNA
agagagttcctggaaaagaactacaccgacgag

SEQ ID NO: 75126 - RNA, 27 nt, synthetic construct
  misc_feature 1..27: note = TBC1 domain family member 16 (242-250)
  source 1..27: mol_type = other RNA
agagagttccccgaagccgaggctctg

SEQ ID NO: 75127 - RNA, 27 nt, synthetic construct
  misc_feature 1..27: note = Leucine-rich repeat and calponin homology domain-containing protein 3 (427-435)
  source 1..27: mol_type = other RNA
agagagttccagaagaccgaagacatg

SEQ ID NO: 75128 - RNA, 27 nt, synthetic construct
  misc_feature 1..27: note = 5,6-dihydroxyindole-2-carboxylic acid oxidase (471-479)
  source 1..27: mol_type = other RNA
agagagttcagcgtgcccgaaatcatt

SEQ ID NO: 75129 - RNA, 27 nt, synthetic construct
  misc_feature 1..27: note = Rhophilin-2 (553-561)
  source 1..27: mol_type = other RNA
agagagggcgactacatcgtgagcatt

SEQ ID NO: 75130 - RNA, 33 nt, synthetic construct
  misc_feature 1..33: note = Contactin-associated protein-like 3B (224-234)
  source 1..33: mol_type = other RNA
agagagggccagcacgggaaccatatcaccctg

SEQ ID NO: 75131 - RNA, 36 nt, synthetic construct
  misc_feature 1..36: note = Colorectal mutant cancer protein (255-266)
  source 1..36: mol_type = other RNA
agagagcacgaagacgtgcaggagaggaccacactg

SEQ ID NO: 75132 - RNA, 27 nt, synthetic construct
  misc_feature 1..27: note = Protein orai-2 (155-163)
  source 1..27: mol_type = other RNA
agagagatcgaagagctgcacaagctc

SEQ ID NO: 75133 - RNA, 27 nt, synthetic construct
  misc_feature 1..27: note = Pyridoxal-dependent decarboxylase domain-containing protein 1 (596-604)
  source 1..27: mol_type = other RNA
agagagatcgaagagaacagcaggctg

SEQ ID NO: 75134 - RNA, 27 nt, synthetic construct
  misc_feature 1..27: note = Zinc finger FYVE domain-containing protein 16 (199-207)
  source 1..27: mol_type = other RNA
agagagatcggcgggattaaggaactg

SEQ ID NO: 75135 - RNA, 33 nt, synthetic construct
  misc_feature 1..33: note = Cathepsin K (225-235)
  source 1..33: mol_type = other RNA
agagagatccccgaaggcaacgagaaggccctg

SEQ ID NO: 75136 - RNA, 27 nt, synthetic construct
  misc_feature 1..27: note = Calcineurin-binding protein cabin-1 (253-261)
  source 1..27: mol_type = other RNA
agagagaaggaacccgacctgaaactc

SEQ ID NO: 75137 - RNA, 27 nt, synthetic construct
  misc_feature 1..27: note = B-cell lymphoma 3 protein (77-85)
  source 1..27: mol_type = other RNA
agagagctggacatctacaacaatctc

SEQ ID NO: 75138 - RNA, 27 nt, synthetic construct
  misc_feature 1..27: note = Serine/threonine-protein kinase Nek9 (195-203)
  source 1..27: mol_type = other RNA
agagagatggaagagaaggtgaccctg

SEQ ID NO: 75139 - RNA, 27 nt, synthetic construct
  misc_feature 1..27: note = Vimentin (345-353)
  source 1..27: mol_type = other RNA
agagagatggaagagaacttcgccgtg

SEQ ID NO: 75140 - RNA, 27 nt, synthetic construct
  misc_feature 1..27: note = Mitogen-activated protein kinase kinase kinase 1 (162-170)
  source 1..27: mol_type = other RNA
agagagatggaaaacaaggagaccctg

SEQ ID NO: 75141 - RNA, 30 nt, synthetic construct
  misc_feature 1..30: note = Protein lin-9 homolog (312-321)
  source 1..30: mol_type = other RNA
agagagatgaacaccgaagccgagaagctg

SEQ ID NO: 75142 - RNA, 30 nt, synthetic construct
  misc_feature 1..30: note = KN motif and ankyrin repeat domain-containing protein 1 (483-492)
  source 1..30: mol_type = other RNA
agagagatgaccaagctgaaacaggaactc

SEQ ID NO: 75143 - RNA, 30 nt, synthetic construct
  misc_feature 1..30: note = Sorting nexin-29 (92-101)
  source 1..30: mol_type = other RNA
agagagaacgaagtgctgaaggtccagctc

SEQ ID NO: 75144 - RNA, 27 nt, synthetic construct
  misc_feature 1..27: note = RNA-binding protein 27 (502-510)
  source 1..27: mol_type = other RNA
agagagaacaatgaacagcccaccctg

SEQ ID NO: 75145 - RNA, 33 nt, synthetic construct
  misc_feature 1..33: note = N-alpha-acetyltransferase 11 (175-185)
  source 1..33: mol_type = other RNA
agagagaaccaggaaacccaaggcagcacactg

SEQ ID NO: 75146 - RNA, 30 nt, synthetic construct
  misc_feature 1..30: note = Heterogeneous nuclear ribonucleoprotein K (171-180)
  source 1..30: mol_type = other RNA
agagagaacacccagacaactatcaagctg

SEQ ID NO: 75147 - RNA, 33 nt, synthetic construct
  misc_feature 1..33: note = Probable ATP-dependent RNA helicase DDX5 (511-521)
  source 1..33: mol_type = other RNA
agagagaactacgacaggggctatagctccctg

SEQ ID NO: 75148 - RNA, 36 nt, synthetic construct
  misc_feature 1..36: note = Probable ATP-dependent RNA helicase DDX5 (511-522)
  source 1..36: mol_type = other RNA
agagagaactacgacaggggctatagctccctgctc

SEQ ID NO: 75149 - RNA, 30 nt, synthetic construct
  misc_feature 1..30: note = Hsp70-binding protein 1 (357-366)
  source 1..30: mol_type = other RNA
agagagcccgaactgggcctcgaggaactt

SEQ ID NO: 75150 - RNA, 30 nt, synthetic construct
  misc_feature 1..30: note = Tripartite motif-containing protein 65 (51-60)
  source 1..30: mol_type = other RNA
agagagcccttccctgacggcgccgaactg

SEQ ID NO: 75151 - RNA, 30 nt, synthetic construct
  misc_feature 1..30: note = Melanoma-associated antigen 2 (155-164)
  source 1..30: mol_type = other RNA
agagagcccgtgaccaaggccgaaatgctg

SEQ ID NO: 75152 - RNA, 27 nt, synthetic construct
  misc_feature 1..27: note = FAS-associated factor 1 (349-357)
  source 1..27: mol_type = other RNA
agagagcaggacgaagcctacaggctg

SEQ ID NO: 75153 - RNA, 27 nt, synthetic construct
  misc_feature 1..27: note = Intersectin-2 (475-483)
  source 1..27: mol_type = other RNA
agagagcaggaagagatcgtgaggctg

SEQ ID NO: 75154 - RNA, 30 nt, synthetic construct
  misc_feature 1..30: note = L-dopachrome tautomerase (138-147)
  source 1..30: mol_type = other RNA
agagagcagttcctgggcgccctcgacctt

SEQ ID NO: 75155 - RNA, 33 nt, synthetic construct
  misc_feature 1..33: note = Ras-responsive element-binding protein 1 (361-371)
  source 1..33: mol_type = other RNA
agagagcagcccagcgaaggcgccaccgagctg

SEQ ID NO: 75156 - RNA, 27 nt, synthetic construct
  misc_feature 1..27: note = Microtubule-actin cross-linking factor 1, isoforms 1/2/3/5 (4309-4317)
  source 1..27: mol_type = other RNA
agagagcagcaactgcagagcaccctc

SEQ ID NO: 75157 - RNA, 27 nt, synthetic construct
  misc_feature 1..27: note = V-type proton ATPase subunit D (194-202)
  source 1..27: mol_type = other RNA
agagagagggaagagttctaccggctg

SEQ ID NO: 75158 - RNA, 27 nt, synthetic construct
  misc_feature 1..27: note = Eukaryotic translation initiation factor 4B (372-380)
  source 1..27: mol_type = other RNA
agagagagggaagtggaggaacggctg

SEQ ID NO: 75159 - RNA, 33 nt, synthetic construct
  misc_feature 1..33: note = Proteasome activator complex subunit 3 (19-29)
  source 1..33: mol_type = other RNA
agagagaggatcaccagcgaagccgaggacctg

SEQ ID NO: 75160 - RNA, 27 nt, synthetic construct
  misc_feature 1..27: note = Lysosomal-trafficking regulator (1440-1448)
  source 1..27: mol_type = other RNA
agagagagcttcccccacaggctgctc

SEQ ID NO: 75161 - RNA, 30 nt, synthetic construct
  misc_feature 1..30: note = Cytoplasmic dynein 1 intermediate chain 1 (57-66)
  source 1..30: mol_type = other RNA
agagagaccgaagccctgctccagagcatc

SEQ ID NO: 75162 - RNA, 30 nt, synthetic construct
  misc_feature 1..30: note = Annexin A5 (227-236)
  source 1..30: mol_type = other RNA
agagagaccagcggcaacctggaacagctc

SEQ ID NO: 75163 - RNA, 33 nt, synthetic construct
  misc_feature 1..33: note = Dexamethasone-induced Ras-related protein 1 (153-163)
  source 1..33: mol_type = other RNA
agagaggtggaccagagggaaatcgagcaactg

SEQ ID NO: 75164 - RNA, 39 nt, synthetic construct
  misc_feature 1..39: note = Dual specificity protein phosphatase 10 (294-306)
  source 1..39: mol_type = other RNA
agagaggtgggcgggggagccagcgctgcatcctctctg

SEQ ID NO: 75165 - RNA, 33 nt, synthetic construct
  misc_feature 1..33: note = Transmembrane channel-like protein 6 (57-67)
  source 1..33: mol_type = other RNA
agagaggtgaccggcagctcccagcaaacactg

SEQ ID NO: 75166 - RNA, 30 nt, synthetic construct
  misc_feature 1..30: note = Sarcoplasmic/endoplasmic reticulum calcium ATPase 2 (549-558)
  source 1..30: mol_type = other RNA
agagagtggggcagcgggtccgacaccctg

SEQ ID NO: 75167 - RNA, 30 nt, synthetic construct
  misc_feature 1..30: note = GPN-loop GTPase 1 (251-260)
  source 1..30: mol_type = other RNA
agagagtacaggcccgaatatgagcggctg

SEQ ID NO: 75168 - RNA, 27 nt, synthetic construct
  misc_feature 1..27: note = Rab-like protein 3 (198-206)
  source 1..27: mol_type = other RNA
agattctttgacaaggtgatcgagaaa

SEQ ID NO: 75169 - RNA, 30 nt, synthetic construct
  misc_feature 1..30: note = DNA mismatch repair protein Msh3 (26-35)
  source 1..30: mol_type = other RNA
agattctttcagagcaccggctccctgaag

SEQ ID NO: 75170 - RNA, 54 nt, synthetic construct
  misc_feature 1..54: note = Transgelin-2 (182-199)
  source 1..54: mol_type = other RNA
agaggcgccagccaggctgggatgaccggatacggtatgcccaggcaaatcctg

SEQ ID NO: 75171 - RNA, 33 nt, synthetic construct
  misc_feature 1..33: note = F-box/LRR-repeat protein 4 (358-368)
  source 1..33: mol_type = other RNA
agaggcttcatcagcgtggccgggttttccagg

SEQ ID NO: 75172 - RNA, 33 nt, synthetic construct
  misc_feature 1..33: note = Isocitrate dehydrogenase (NAD) subunit alpha, mitochondrial (25-35)
  source 1..33: mol_type = other RNA
agaggcttcaccgggggaatcaactttgccaag

SEQ ID NO: 75173 - RNA, 27 nt, synthetic construct
  misc_feature 1..27: note = POM121 and ZP3 fusion protein (9-17)
  source 1..27: mol_type = other RNA
agaatcgccccccctgacaggcggttc

SEQ ID NO: 75174 - RNA, 33 nt, synthetic construct
  misc_feature 1..33: note = Histone H2B type 1-A (74-84)
  source 1..33: mol_type = other RNA
agaatcgccagcgaggcttccaggctggcacac

SEQ ID NO: 75175 - RNA, 27 nt, synthetic construct
  misc_feature 1..27: note = Cell division cycle 5-like protein (33-41)
  source 1..27: mol_type = other RNA
agaatcgccagcctgctccacaggaag

SEQ ID NO: 75176 - RNA, 30 nt, synthetic construct
  misc_feature 1..30: note = Transmembrane protein 230 (98-107)
  source 1..30: mol_type = other RNA
agaatcgcctactatgctagcaagggctac

SEQ ID NO: 75177 - RNA, 27 nt, synthetic construct
  misc_feature 1..27: note = Galectin-3-binding protein (216-224)
  source 1..27: mol_type = other RNA
agaatcgacattaccctgagctccgtg

SEQ ID NO: 75178 - RNA, 27 nt, synthetic construct
  misc_feature 1..27: note = Nuclear pore complex protein Nup88 (356-364)
  source 1..27: mol_type = other RNA
agaatcgacctgattcccagcctctac

SEQ ID NO: 75179 - RNA, 33 nt, synthetic construct
  misc_feature 1..33: note Dolichyl-diphosphooligosaccharide-proteinosyltransferase 48 kDa subunit (359-369)
  source 1..33: mol_type = other RNA
agaatcgaccccttcgtgaggacctttctgaag

SEQ ID NO: 75180 - RNA, 33 nt, synthetic construct
  misc_feature 1..33: note = 78 kDa glucose-regulated protein (540-550)
  source 1..33: mol_type = other RNA
agaatcgacaccaggaacgagctggaaagctac

SEQ ID NO: 75181 - RNA, 27 nt, synthetic construct
  misc_feature 1..27: note = Tuftelin-interacting protein 11 (402-410)
  source 1..27: mol_type = other RNA
agaatcttcgagaccctgcaggacaag

SEQ ID NO: 75182 - RNA, 27 nt, synthetic construct
  misc_feature 1..27: note = DNA-directed RNA polymerase III subunit RPC3 (364-372)
  source 1..27: mol_type = other RNA
agaatcttcaggctggtgctccagaag

SEQ ID NO: 75183 - RNA, 27 nt, synthetic construct
  misc_feature 1..27: note = Serine/threonine-protein phosphatase 2A regulatory subunit B'' subunit beta (354-362)
  source 1..27: mol_type = other RNA
agaatcttcagcggcgccgtgaccagg

SEQ ID NO: 75184 - RNA, 39 nt, synthetic construct
  misc_feature 1..39: note = Interleukin enhancer-binding factor 3 (5-17)
  source 1..39: mol_type = other RNA
agaatcttcgtgaacgacgataggcacgtcatggccaag

SEQ ID NO: 75185 - RNA, 27 nt, synthetic construct
  misc_feature 1..27: note = Peroxisome biogenesis factor 10 (83-91)
  source 1..27: mol_type = other RNA
agaatccacgtgcccagctccctgagg

SEQ ID NO: 75186 - RNA, 27 nt, synthetic construct
  misc_feature 1..27: note = A-kinase anchor protein 13 (58-66)
  source 1..27: mol_type = other RNA
agaatcattgacagcaagttcctgaaa

SEQ ID NO: 75187 - RNA, 27 nt, synthetic construct
  misc_feature 1..27: note = Oligoribonuclease, mitochondrial (133-141)
  source 1..27: mol_type = other RNA
agaatcattgacgtgagcaccgtcaag

SEQ ID NO: 75188 - RNA, 27 nt, synthetic construct
  misc_feature 1..27: note = Actin filament-associated protein 1-like 1 (363-371)
  source 1..27: mol_type = other RNA
agaatcattggcttcagcaagaaaaag

SEQ ID NO: 75189 - RNA, 33 nt, synthetic construct
  misc_feature 1..33: note = Choline kinase alpha (244-254)
  source 1..33: mol_type = other RNA
agaatcaagttcaccgaggaaagcaggattaaa

SEQ ID NO: 75190 - RNA, 27 nt, synthetic construct
  misc_feature 1..27: note = Endothelin B receptor (208-216)
  source 1..27: mol_type = other RNA
agaatcaagggcattggggtgcccaaa

SEQ ID NO: 75191 - RNA, 30 nt, synthetic construct
  misc_feature 1..30: note = Uncharacterized protein C1orf21 (35-44)
  source 1..30: mol_type = other RNA
agaatcaagcccgtggaggaagtcaaatac

SEQ ID NO: 75192 - RNA, 27 nt, synthetic construct
  misc_feature 1..27: note = Chromodomain-helicase-DNA-binding protein 8 (579-587)
  source 1..27: mol_type = other RNA
agaatcctggacgagagccactccatt

SEQ ID NO: 75193 - RNA, 30 nt, synthetic construct
  misc_feature 1..30: note = SH3 domain-binding glutamic acid-rich-like protein 3 (159-168)
  source 1..30: mol_type = other RNA
agaatcctggacggcaagaggattcagtac

SEQ ID NO: 75194 - RNA, 36 nt, synthetic construct
  misc_feature 1..36: note = Ubiquitin conjugation factor E4 B (856-867)
  source 1..36: mol_type = other RNA
agaatcctggaccccgcctaccctgatattaccctc

SEQ ID NO: 75195 - RNA, 27 nt, synthetic construct
  misc_feature 1..27: note = Shugoshin-like 2 (1098-1106)
  source 1..27: mol_type = other RNA
agaatcctggacagcgtgcagggcaag

SEQ ID NO: 75196 - RNA, 33 nt, synthetic construct
  misc_feature 1..33: note = Serine/threonine-protein phosphatase 6 regulatory subunit 3 (385-395)
  source 1..33: mol_type = other RNA
agaatcctggaggcctgggaaatgaacgagaag

SEQ ID NO: 75197 - RNA, 33 nt, synthetic construct
  misc_feature 1..33: note = 60S ribosomal protein L19 (117-127)
  source 1..33: mol_type = other RNA
agaatcctgatggagcacattcataagctcaaa

SEQ ID NO: 75198 - RNA, 33 nt, synthetic construct
  misc_feature 1..33: note = Eukaryotic translation initiation factor 3 subunit A (623-633)
  source 1..33: mol_type = other RNA
agaatcctgcaggagcacgaacaaattaagaaa

SEQ ID NO: 75199 - RNA, 30 nt, synthetic construct
  misc_feature 1..30: note = Pre-mRNA-splicing factor ATP-dependent RNA helicase DHX15 (666-675)
  source 1..30: mol_type = other RNA
agaatcatggacaggttcaacctgccccgg

SEQ ID NO: 75200 - RNA, 33 nt, synthetic construct
  misc_feature 1..33: note = Cell differentiation protein RCD1 homolog (169-179)
  source 1..33: mol_type = other RNA
agaatcatggagagcggctccgaactgtctaag

SEQ ID NO: 75201 - RNA, 33 nt, synthetic construct
  misc_feature 1..33: note = Elongation factor 2 (428-438)
  source 1..33: mol_type = other RNA
agaatcatgggccccaactacacccctgggaag

SEQ ID NO: 75202 - RNA, 33 nt, synthetic construct
  misc_feature 1..33: note = Calcineurin binding protein 1, isoform CRA_c (308-318)
  source 1..33: mol_type = other RNA
agaatcatgagcgagacctacatgctgattaag

SEQ ID NO: 75203 - RNA, 27 nt, synthetic construct
  misc_feature 1..27: note = Synaptonemal complex central element protein 1 (59-67)
  source 1..27: mol_type = other RNA
agaatcaacgaggtgcagcaagccaag

SEQ ID NO: 75204 - RNA, 30 nt, synthetic construct
  misc_feature 1..30: note = Ninein (1240-1249)
  source 1..30: mol_type = other RNA
agaatccccgaggccagccctaagtacaaa

SEQ ID NO: 75205 - RNA, 30 nt, synthetic construct
  misc_feature 1..30: note = Ribosomal protein 63, mitochondrial (11-20)
  source 1..30: mol_type = other RNA
agaatccccggcaggcagtggattgggaag

SEQ ID NO: 75206 - RNA, 33 nt, synthetic construct
  misc_feature 1..33: note = Cullin-1 (328-338)
  source 1..33: mol_type = other RNA
agaatccaggacggcctgggggagctcaagaaa

SEQ ID NO: 75207 - RNA, 33 nt, synthetic construct
  misc_feature 1..33: note = Malate dehydrogenase, mitochondrial (229-239)
  source 1..33: mol_type = other RNA
agaatccaggaggccggcaccgaagtggtcaag

SEQ ID NO: 75208 - RNA, 27 nt, synthetic construct
  misc_feature 1..27: note = Spectrin beta chain, non-erythrocytic 1 (1245-1253)
  source 1..27: mol_type = other RNA
agaatccaggagaaggtggacagcatt

SEQ ID NO: 75209 - RNA, 30 nt, synthetic construct
  misc_feature 1..30: note = Thyroid adenoma-associated protein (692-701)
  source 1..30: mol_type = other RNA
agaatccaggagagctcccaagtgctgtac

SEQ ID NO: 75210 - RNA, 27 nt, synthetic construct
  misc_feature 1..27: note = DNA replication licensing factor MCM6 (207-215)
  source 1..27: mol_type = other RNA
agaatccaggagacccaagccgaactg

SEQ ID NO: 75211 - RNA, 27 nt, synthetic construct
  misc_feature 1..27: note = Antigen KI-67 (38-46)
  source 1..27: mol_type = other RNA
agaatccagctgcccgtggtcagcaag

SEQ ID NO: 75212 - RNA, 27 nt, synthetic construct
  misc_feature 1..27: note = RNA-binding E3 ubiquitin-protein ligase MEX3C (156-164)
  source 1..27: mol_type = other RNA
agaatccagcaacagacccacacatac

SEQ ID NO: 75213 - RNA, 33 nt, synthetic construct
  misc_feature 1..33: note = Tubulin beta chain (18-28)
  source 1..33: mol_type = other RNA
agaatcagcgagcagttcaccgccatgtttagg

SEQ ID NO: 75214 - RNA, 27 nt, synthetic construct
  misc_feature 1..27: note = Zinc finger protein 529 (330-338)
  source 1..27: mol_type = other RNA
agaatcagctcccagctgattgagcac

SEQ ID NO: 75215 - RNA, 27 nt, synthetic construct
  misc_feature 1..27: note = Lysine-specific histone demethylase 1B (473-481)
  source 1..27: mol_type = other RNA
agaatcaccgaccccacaattgataag

SEQ ID NO: 75216 - RNA, 30 nt, synthetic construct
  misc_feature 1..30: note = Cleavage stimulation factor subunit 2 (179-188)
  source 1..30: mol_type = other RNA
agaatcgtggaccccgagattgccctgaag

SEQ ID NO: 75217 - RNA, 27 nt, synthetic construct
  misc_feature 1..27: note = Unconventional myosin-X (239-247)
  source 1..27: mol_type = other RNA
agaatcgtggactacctgctcgagaag

SEQ ID NO: 75218 - RNA, 27 nt, synthetic construct
  misc_feature 1..27: note = CDP-diacylglycerol-glycerol-3-phosphate 3-phosphatidyltransferase, mitochondrial (76-84)
  source 1..27: mol_type = other RNA
agaatctggagcctgcagttctccagg

SEQ ID NO: 75219 - RNA, 27 nt, synthetic construct
  misc_feature 1..27: note = Dynein heavy chain 6, axonemal (191-199)
  source 1..27: mol_type = other RNA
agaatctacgccgctaccttcgagaag

SEQ ID NO: 75220 - RNA, 30 nt, synthetic construct
  misc_feature 1..30: note = DNA-directed RNA polymerase II subunit RPB2 (409-418)
  source 1..30: mol_type = other RNA
agaatctacgcccagaagttcattgacagg

SEQ ID NO: 75221 - RNA, 27 nt, synthetic construct
  misc_feature 1..27: note = U4/U6 small nuclear ribonucleoprotein Prp31 (203-211)
  source 1..27: mol_type = other RNA
agaatctacgagtatgtggaaagcagg

SEQ ID NO: 75222 - RNA, 27 nt, synthetic construct
  misc_feature 1..27: note = Long-chain-fatty-acid-CoA ligase 4 (339-347)
  source 1..27: mol_type = other RNA
agaatctacaagaacgtgatgagcaaa

SEQ ID NO: 75223 - RNA, 27 nt, synthetic construct
  misc_feature 1..27: note = 28S ribosomal protein S21, mitochondrial (50-58)
  source 1..27: mol_type = other RNA
agaatctacaacatggagatggccagg

SEQ ID NO: 75224 - RNA, 27 nt, synthetic construct
  misc_feature 1..27: note = Ankyrin repeat and SOCS box protein 4 (318-326)
  source 1..27: mol_type = other RNA
agaatctacccccctcagttccacaag

SEQ ID NO: 75225 - RNA, 27 nt, synthetic construct
  misc_feature 1..27: note = Transformation/transcription domain-associated protein (296-304)
  source 1..27: mol_type = other RNA
agaatctaccaggagctggtgaccaag

SEQ ID NO: 75226 - RNA, 30 nt, synthetic construct
  misc_feature 1..30: note = Semaphorin-5A (736-745)
  source 1..30: mol_type = other RNA
agactggccgaccccaacctccttgaggtg

SEQ ID NO: 75227 - RNA, 27 nt, synthetic construct
  misc_feature 1..27: note = Long-chain fatty acid transport protein 3 (117-125)
  source 1..27: mol_type = other RNA
agactggccgagctcgctcagcaaagg

SEQ ID NO: 75228 - RNA, 33 nt, synthetic construct
  misc_feature 1..33: note = E3 ubiquitin-protein ligase TRIM56 (291-301)
  source 1..33: mol_type = other RNA
agactggccgagctcgaaggcagggagcaggtg

SEQ ID NO: 75229 - RNA, 27 nt, synthetic construct
  misc_feature 1..27: note = Catenin beta-1 (124-132)
  source 1..27: mol_type = other RNA
agactggccgagcccagccagatgctc

SEQ ID NO: 75230 - RNA, 27 nt, synthetic construct
  misc_feature 1..27: note = 14-3-3 protein eta (12-20)
  source 1..27: mol_type = other RNA
agactggccgagcaggctgaaaggtac

SEQ ID NO: 75231 - RNA, 27 nt, synthetic construct
  misc_feature 1..27: note = Syntaxin-binding protein 1 (171-179)
  source 1..27: mol_type = other RNA
agactggccgagcagatcgctaccctc

SEQ ID NO: 75232 - RNA, 27 nt, synthetic construct
  misc_feature 1..27: note = GPALPP motifs-containing protein 1 (89-97)
  source 1..27: mol_type = other RNA
agactggccgagcaggtgagctcctac

SEQ ID NO: 75233 - RNA, 30 nt, synthetic construct
  misc_feature 1..30: note = Ubiquitin carboxyl-terminal hydrolase 19 (897-906)
  source 1..30: mol_type = other RNA
agactggccgaggtgatcaagaacaggttc

SEQ ID NO: 75234 - RNA, 33 nt, synthetic construct
  misc_feature 1..33: note = Receptor tyrosine-protein kinase erbB-3 (916-926)
  source 1..33: mol_type = other RNA
agactggccgaggtgcccgacctccttgaaaag

SEQ ID NO: 75235 - RNA, 33 nt, synthetic construct
  misc_feature 1..33: note = Catenin beta-1 (274-284)
  source 1..33: mol_type = other RNA
agactggccggcgggctccagaagatggtggct

SEQ ID NO: 75236 - RNA, 27 nt, synthetic construct
  misc_feature 1..27: note = Echinoderm microtubule-associated protein-like 3 (815-823)
  source 1..27: mol_type = other RNA
agactggcccccaggctcgctggccgg

SEQ ID NO: 75237 - RNA, 27 nt, synthetic construct
  misc_feature 1..27: note = Nucleolar protein 56 (212-220)
  source 1..27: mol_type = other RNA
agactggcccagttcatcggcaacagg

SEQ ID NO: 75238 - RNA, 27 nt, synthetic construct
  misc_feature 1..27: note = Sorting nexin-17 (261-269)
  source 1..27: mol_type = other RNA
agactggcccagaccctcaggcactac

SEQ ID NO: 75239 - RNA, 36 nt, synthetic construct
  misc_feature 1..36: note = Microtubule-associated protein 4 (922-933)
  source 1..36: mol_type = other RNA
agactggccaccaacacaagcgctcccgacctcaag

SEQ ID NO: 75240 - RNA, 27 nt, synthetic construct
  misc_feature 1..27: note = P2X purinoceptor 7 (277-285)
  source 1..27: mol_type = other RNA
agactggacgataagaccacaaacgtg

SEQ ID NO: 75241 - RNA, 33 nt, synthetic construct
  misc_feature 1..33: note = Nuclear RNA export factor 1 (219-229)
  source 1..33: mol_type = other RNA
agactggacgatatgagctccatcgtgcagaag

SEQ ID NO: 75242 - RNA, 30 nt, synthetic construct
  misc_feature 1..30: note = Potassium voltage-gated channel subfamily G member 3 (115-124)
  source 1..30: mol_type = other RNA
agactggacgataggatgagcgacacctac

SEQ ID NO: 75243 - RNA, 30 nt, synthetic construct
  misc_feature 1..30: note = FERM domain-containing protein 6 (225-234)
  source 1..30: mol_type = other RNA
agactggacgatgtggccgtccactactat

SEQ ID NO: 75244 - RNA, 27 nt, synthetic construct
  misc_feature 1..27: note Dolichyl-diphosphooligosaccharide-proteinosyltransferase subunit 2 (190-198)
  source 1..27: mol_type = other RNA
agactggacgagctcggcggggtgtac

SEQ ID NO: 75245 - RNA, 27 nt, synthetic construct
  misc_feature 1..27: note = Activating signal cointegrator 1 (224-232)
  source 1..27: mol_type = other RNA
agactggacgagaccatccaggccatt

SEQ ID NO: 75246 - RNA, 27 nt, synthetic construct
  misc_feature 1..27: note = Helicase-like transcription factor (880-888)
  source 1..27: mol_type = other RNA
agactggacggcagcatggcccagaag

SEQ ID NO: 75247 - RNA, 27 nt, synthetic construct
  misc_feature 1..27: note = Tubulin alpha-1C chain (355-363)
  source 1..27: mol_type = other RNA
agactggaccacaagttcgatctcatg

SEQ ID NO: 75248 - RNA, 27 nt, synthetic construct
  misc_feature 1..27: note = Protein kinase C and casein kinase substrate in neurons protein 2 (427-435)
  source 1..27: mol_type = other RNA
agactggacaacggccaggtggggctc

SEQ ID NO: 75249 - RNA, 27 nt, synthetic construct
  misc_feature 1..27: note = Coiled-coil domain-containing protein 138 (306-314)
  source 1..27: mol_type = other RNA
agactggacaacctccagaggaagtac

SEQ ID NO: 75250 - RNA, 27 nt, synthetic construct
  misc_feature 1..27: note = Melanoma antigen preferentially expressed in tumors (312-320)
  source 1..27: mol_type = other RNA
agactggaccagctccttaggcacgtg

SEQ ID NO: 75251 - RNA, 27 nt, synthetic construct
  misc_feature 1..27: note = Coiled-coil domain-containing protein 91 (405-413)
  source 1..27: mol_type = other RNA
agactggaccaggtgatcaggcaacgg

SEQ ID NO: 75252 - RNA, 33 nt, synthetic construct
  misc_feature 1..33: note = Nicastrin (281-291)
  source 1..33: mol_type = other RNA
agactggacagcaggtccttcttttggaacgtg

SEQ ID NO: 75253 - RNA, 27 nt, synthetic construct
  misc_feature 1..27: note = C-Jun-amino-terminal kinase-interacting protein 4 (1097-1105)
  source 1..27: mol_type = other RNA
agactggacagcaccctcaggctttac

SEQ ID NO: 75254 - RNA, 27 nt, synthetic construct
  misc_feature 1..27: note = Cyclin-dependent kinase 2 (36-44)
  source 1..27: mol_type = other RNA
agactggacaccgagacagaaggcgtg

SEQ ID NO: 75255 - RNA, 27 nt, synthetic construct
  misc_feature 1..27: note = Uncharacterized protein C19orf60 (50-58)
  source 1..27: mol_type = other RNA
agactggaggaaggccacaggcagtac

SEQ ID NO: 75256 - RNA, 30 nt, synthetic construct
  misc_feature 1..30: note = Cap-specific mRNAucleoside-2'-O-)-methyltransferase 1 (708-717)
  source 1..30: mol_type = other RNA
agactggaggaaatggagaagatcttcgtg

SEQ ID NO: 75257 - RNA, 33 nt, synthetic construct
  misc_feature 1..33: note = Pre-mRNA-processing factor 6 (317-327)
  source 1..33: mol_type = other RNA
agactggaggaagtgaccggcaagctccaggtc

SEQ ID NO: 75258 - RNA, 30 nt, synthetic construct
  misc_feature 1..30: note = Armadillo repeat-containing protein 8 (27-36)
  source 1..30: mol_type = other RNA
agactgttcgaccccgatcctcagaaggtg

SEQ ID NO: 75259 - RNA, 30 nt, synthetic construct
  misc_feature 1..30: note = Receptor-interacting serine/threonine-protein kinase 4 (198-207)
  source 1..30: mol_type = other RNA
agactgttcgacaccaagcacgatgtgtac

SEQ ID NO: 75260 - RNA, 30 nt, synthetic construct
  misc_feature 1..30: note = Phosphatidylinositol 4-kinase beta (132-141)
  source 1..30: mol_type = other RNA
agactgttcgagagcaagctctttgacatc

SEQ ID NO: 75261 - RNA, 30 nt, synthetic construct
  misc_feature 1..30: note = Cartilage-associated protein (107-116)
  source 1..30: mol_type = other RNA
agactgttcggcgggctccttaggcgggcc

SEQ ID NO: 75262 - RNA, 30 nt, synthetic construct
  misc_feature 1..30: note = Synaptonemal complex protein SC65 (104-113)
  source 1..30: mol_type = other RNA
agactgttcggcagggtgctcgagcgggcc

SEQ ID NO: 75263 - RNA, 36 nt, synthetic construct
  misc_feature 1..36: note = Diamine acetyltransferase 1 (155-166)
  source 1..36: mol_type = other RNA
agactgttcaagatcgacaaagagtacctccttaag

SEQ ID NO: 75264 - RNA, 33 nt, synthetic construct
  misc_feature 1..33: note = Dol-P-Man:Man(5)GlcNAc(2)-PP-Dol alpha-1,3-mannosyltransferase (123-133)
  source 1..33: mol_type = other RNA
agactgttcaacgaccccgtggccatggtcctc

SEQ ID NO: 75265 - RNA, 27 nt, synthetic construct
  misc_feature 1..27: note = Membralin (58-66)
  source 1..27: mol_type = other RNA
agactgttcccccctgcctttaggcgg

SEQ ID NO: 75266 - RNA, 27 nt, synthetic construct
  misc_feature 1..27: note = DNA primase small subunit (19-27)
  source 1..27: mol_type = other RNA
agactgttcccctacagccagtattac

SEQ ID NO: 75267 - RNA, 27 nt, synthetic construct
  misc_feature 1..27: note = Homeobox protein cut-like 1 (640-648)
  source 1..27: mol_type = other RNA
agactgttccaggaggtgcccaagagg

SEQ ID NO: 75268 - RNA, 33 nt, synthetic construct
  misc_feature 1..33: note = Coatomer subunit gamma-2 (75-85)
  source 1..33: mol_type = other RNA
agactgttccagagcaacgaccaaaccctcagg

SEQ ID NO: 75269 - RNA, 27 nt, synthetic construct
  misc_feature 1..27: note = 28S ribosomal protein S2, mitochondrial (251-259)
  source 1..27: mol_type = other RNA
agactgttccagaccgccatcacaagg

SEQ ID NO: 75270 - RNA, 27 nt, synthetic construct
  misc_feature 1..27: note = Armadillo repeat-containing protein 2 (134-142)
  source 1..27: mol_type = other RNA
agactgttcagggccgctagccagcgg

SEQ ID NO: 75271 - RNA, 30 nt, synthetic construct
  misc_feature 1..30: note = Nicalin (40-49)
  source 1..30: mol_type = other RNA
agactgttcagcaggctctacacctataag

SEQ ID NO: 75272 - RNA, 36 nt, synthetic construct
  misc_feature 1..36: note = C-Jun-amino-terminal kinase-interacting protein 4 (548-559)
  source 1..36: mol_type = other RNA
agactgttcagctcctcttcaaacaccacaaagaaa

SEQ ID NO: 75273 - RNA, 30 nt, synthetic construct
  misc_feature 1..30: note = 40S ribosomal protein S17 (23-32)
  source 1..30: mol_type = other RNA
agactgggcaacgacttccacaccaataag

SEQ ID NO: 75274 - RNA, 30 nt, synthetic construct
  misc_feature 1..30: note = Thrombospondin-2 (245-254)
  source 1..30: mol_type = other RNA
agactgggcccccacgtgaccacagagtac

SEQ ID NO: 75275 - RNA, 27 nt, synthetic construct
  misc_feature 1..27: note = Ankyrin repeat domain-containing protein 54 (100-108)
  source 1..27: mol_type = other RNA
agactgggccccaccgggaaggaggtg

SEQ ID NO: 75276 - RNA, 30 nt, synthetic construct
  misc_feature 1..30: note = Protein fantom (56-65)
  source 1..30: mol_type = other RNA
agactgcacgacgagaacatcctccttaag

SEQ ID NO: 75277 - RNA, 39 nt, synthetic construct
  misc_feature 1..39: note = 40S ribosomal protein S20 (87-99)
  source 1..39: mol_type = other RNA
agactgatcgacctccacagcccctccgagattgtgaag

SEQ ID NO: 75278 - RNA, 33 nt, synthetic construct
  misc_feature 1..33: note = 28S ribosomal protein S5, mitochondrial (246-256)
  source 1..33: mol_type = other RNA
agactgatcggcattaaggacatgtacgccaaa

SEQ ID NO: 75279 - RNA, 27 nt, synthetic construct
  misc_feature 1..27: note = Abnormal spindle-like microcephaly-associated protein (521-529)
  source 1..27: mol_type = other RNA
agactgatccagaccacatggaggaag

SEQ ID NO: 75280 - RNA, 27 nt, synthetic construct
  misc_feature 1..27: note = Calcineurin-binding protein cabin-1 (136-144)
  source 1..27: mol_type = other RNA
agactgatcaggattcccctcgcccgg

SEQ ID NO: 75281 - RNA, 33 nt, synthetic construct
  misc_feature 1..33: note = Chromatin assembly factor 1 subunit A (782-792)
  source 1..33: mol_type = other RNA
agactgatcagcgagaactccgtgtacgaaaag

SEQ ID NO: 75282 - RNA, 27 nt, synthetic construct
  misc_feature 1..27: note = Rho guanine nucleotide exchange factor 39 (185-193)
  source 1..27: mol_type = other RNA
agactgatcagcgagaccgcccagagg

SEQ ID NO: 75283 - RNA, 36 nt, synthetic construct
  misc_feature 1..36: note = DCN1-like protein 5 (40-51)
  source 1..36: mol_type = other RNA
agactgatcagcggcgaggaacacttctcctctaag

SEQ ID NO: 75284 - RNA, 36 nt, synthetic construct
  misc_feature 1..36: note = 40S ribosomal protein S4, X isoform (81-92)
  source 1..36: mol_type = other RNA
agactgatctacgacaccaagggcaggttcgccgtg

SEQ ID NO: 75285 - RNA, 27 nt, synthetic construct
  misc_feature 1..27: note = Protein PRRC2A (2074-2082)
  source 1..27: mol_type = other RNA
agactgaaggccacccccagcacatac

SEQ ID NO: 75286 - RNA, 27 nt, synthetic construct
  misc_feature 1..27: note = Nuclear migration protein nudC (143-151)
  source 1..27: mol_type = other RNA
agactgaagggcaaagacatggtggtc

SEQ ID NO: 75287 - RNA, 33 nt, synthetic construct
  misc_feature 1..33: note = tRNA-splicing endonuclease subunit Sen34 (58-68)
  source 1..33: mol_type = other RNA
agactgctcgccgagatcggcgctgtgaccctt

SEQ ID NO: 75288 - RNA, 27 nt, synthetic construct
  misc_feature 1..27: note = Transcription factor SPT20 homolog (262-270)
  source 1..27: mol_type = other RNA
agactgctcgacttccttcagaagagg

SEQ ID NO: 75289 - RNA, 27 nt, synthetic construct
  misc_feature 1..27: note = Mitogen-activated protein kinase-binding protein 1 (92-100)
  source 1..27: mol_type = other RNA
agactgctcgacaagtgggtggagctt

SEQ ID NO: 75290 - RNA, 27 nt, synthetic construct
  misc_feature 1..27: note = E3 ubiquitin-protein ligase RNF14 (373-381)
  source 1..27: mol_type = other RNA
agactgctcgaccagaggtacggcaag

SEQ ID NO: 75291 - RNA, 33 nt, synthetic construct
  misc_feature 1..33: note = Lysine-specific histone demethylase 1A (408-418)
  source 1..33: mol_type = other RNA
agactgctcgaggccaccagctacctttcccac

SEQ ID NO: 75292 - RNA, 27 nt, synthetic construct
  misc_feature 1..27: note = 39S ribosomal protein L37, mitochondrial (112-120)
  source 1..27: mol_type = other RNA
agactgctcgagggcgtgaagcaggcc

SEQ ID NO: 75293 - RNA, 27 nt, synthetic construct
  misc_feature 1..27: note = Transient receptor potential cation channel subfamily M member 1 (158-166)
  source 1..27: mol_type = other RNA
agactgctcgagaagcacatcagcctt

SEQ ID NO: 75294 - RNA, 27 nt, synthetic construct
  misc_feature 1..27: note = DNA-directed RNA polymerase III subunit RPC3 (458-466)
  source 1..27: mol_type = other RNA
agactgctcgagaagagccagagggtg

SEQ ID NO: 75295 - RNA, 27 nt, synthetic construct
  misc_feature 1..27: note = citron Rho-interacting kinase isoform X13 (384-392)
  source 1..27: mol_type = other RNA
agactgctcgagcttgaaaccaggctg

SEQ ID NO: 75296 - RNA, 27 nt, synthetic construct
  misc_feature 1..27: note = Clathrin heavy chain 1 (583-591)
  source 1..27: mol_type = other RNA
agactgctcgagatgaaccttatgcac

SEQ ID NO: 75297 - RNA, 33 nt, synthetic construct
  misc_feature 1..33: note = Unconventional myosin-Va (137-147)
  source 1..33: mol_type = other RNA
agactgctcgagagccagcttcaatcccagaag

SEQ ID NO: 75298 - RNA, 33 nt, synthetic construct
  misc_feature 1..33: note = Glycogen synthase kinase-3 beta (319-329)
  source 1..33: mol_type = other RNA
agactgctcgagtacacccccacagccaggctt

SEQ ID NO: 75299 - RNA, 51 nt, synthetic construct
  misc_feature 1..51: note = Oxidation resistance protein 1 (21-37)
  source 1..51: mol_type = other RNA
agactgctcggcttcgggggaggtggcgaggccaggcagacccttgctaag

SEQ ID NO: 75300 - RNA, 24 nt, synthetic construct
  misc_feature 1..24: note = Membrane-associated transporter protein (209-216)
  source 1..24: mol_type = other RNA
agactgctcggcaccgagttccag

SEQ ID NO: 75301 - RNA, 27 nt, synthetic construct
  misc_feature 1..27: note = Microsomal glutathione S-transferase 1 (147-155)
  source 1..27: mol_type = other RNA
agactgctcaagagcaaactttacctg

SEQ ID NO: 75302 - RNA, 27 nt, synthetic construct
  misc_feature 1..27: note = Actin-binding protein anillin (762-770)
  source 1..27: mol_type = other RNA
agactgctccttatcgccaccggcaag

SEQ ID NO: 75303 - RNA, 30 nt, synthetic construct
  misc_feature 1..30: note = DNA replication licensing factor MCM6 (11-20)
  source 1..30: mol_type = other RNA
agactgctcaacaagagcatcattagggtg

SEQ ID NO: 75304 - RNA, 33 nt, synthetic construct
  misc_feature 1..33: note = Activating signal cointegrator 1 complex subunit 3 (832-842)
  source 1..33: mol_type = other RNA
agactgctcaaccttagcaaggtgatcgacaaa

SEQ ID NO: 75305 - RNA, 33 nt, synthetic construct
  misc_feature 1..33: note = Glioma tumor suppressor candidate region gene 2 protein (165-175)
  source 1..33: mol_type = other RNA
agactgctcaaccccagcgccaccagggctaag

SEQ ID NO: 75306 - RNA, 30 nt, synthetic construct
  misc_feature 1..30: note = Ectonucleoside triphosphate diphosphohydrolase 6 (169-178)
  source 1..30: mol_type = other RNA
agactgctccccggcgagaaggcccagaaa

SEQ ID NO: 75307 - RNA, 33 nt, synthetic construct
  misc_feature 1..33: note = Myomegalin (2291-2301)
  source 1..33: mol_type = other RNA
agactgctccagagcaccacagagcaccttaag

SEQ ID NO: 75308 - RNA, 27 nt, synthetic construct
  misc_feature 1..27: note = Carbohydrate sulfotransferase 14 (180-188)
  source 1..27: mol_type = other RNA
agactgctcagcgcctacaggaacaag

SEQ ID NO: 75309 - RNA, 36 nt, synthetic construct
  misc_feature 1..36: note = GPI-anchor transamidase (149-160)
  source 1..36: mol_type = other RNA
agactgctcagcgacgataggtccaacatccttatt

SEQ ID NO: 75310 - RNA, 30 nt, synthetic construct
  misc_feature 1..30: note = Spermatogenesis-associated protein 20 (128-137)
  source 1..30: mol_type = other RNA
agactgctcagcgaggacttcgtgtccgtc

SEQ ID NO: 75311 - RNA, 33 nt, synthetic construct
  misc_feature 1..33: note = Attractin (51-61)
  source 1..33: mol_type = other RNA
agactgctcagcccccctcttaggccacggctg

SEQ ID NO: 75312 - RNA, 36 nt, synthetic construct
  misc_feature 1..36: note = Attractin (51-62)
  source 1..36: mol_type = other RNA
agactgctcagcccccctcttaggccacggctgttg

SEQ ID NO: 75313 - RNA, 27 nt, synthetic construct
  misc_feature 1..27: note = Actin-binding protein anillin (910-918)
  source 1..27: mol_type = other RNA
agactgctcaccagcatcacaactaag

SEQ ID NO: 75314 - RNA, 33 nt, synthetic construct
  misc_feature 1..33: note = Serine/threonine-protein kinase mTOR (2429-2439)
  source 1..33: mol_type = other RNA
agactgatggacaccaacacaaagggcaataaa

SEQ ID NO: 75315 - RNA, 33 nt, synthetic construct
  misc_feature 1..33: note = Dehydrodolichyl diphosphate syntase complex subunit DHDDS (103-113)
  source 1..33: mol_type = other RNA
agactgatggaggaaaaggagaaactccagaag

SEQ ID NO: 75316 - RNA, 27 nt, synthetic construct
  misc_feature 1..27: note = Dedicator of cytokinesis protein 4 (213-221)
  source 1..27: mol_type = other RNA
agactgatggagaggctccttgactac

SEQ ID NO: 75317 - RNA, 27 nt, synthetic construct
  misc_feature 1..27: note = Nuclear receptor-interacting protein 3 (4-12)
  source 1..27: mol_type = other RNA
agactgatggagaccaacctcagcaag

SEQ ID NO: 75318 - RNA, 36 nt, synthetic construct
  misc_feature 1..36: note = Heterogeneous nuclear ribonucleoprotein Q (192-203)
  source 1..36: mol_type = other RNA
agactgatgatggaccccctcaccggccttaacagg

SEQ ID NO: 75319 - RNA, 33 nt, synthetic construct
  misc_feature 1..33: note = Heat shock protein 105 kDa (169-179)
  source 1..33: mol_type = other RNA
agactgatgaacgacatgaccgccgtggctctc

SEQ ID NO: 75320 - RNA, 27 nt, synthetic construct
  misc_feature 1..27: note = RILP-like protein 1 (52-60)
  source 1..27: mol_type = other RNA
agactgatgcccaaggtggtcagggtt

SEQ ID NO: 75321 - RNA, 27 nt, synthetic construct
  misc_feature 1..27: note = U5 small nuclear ribonucleoprotein 200 kDa helicase (841-849)
  source 1..27: mol_type = other RNA
agactgatgagggccatcttcgagatt

SEQ ID NO: 75322 - RNA, 27 nt, synthetic construct
  misc_feature 1..27: note = FYVE, RhoGEF and PH domain-containing protein 4 (32-40)
  source 1..27: mol_type = other RNA
agactgatgagcaagaacttcaccaaa

SEQ ID NO: 75323 - RNA, 27 nt, synthetic construct
  misc_feature 1..27: note = Hyaluronan mediated motility receptor (119-127)
  source 1..27: mol_type = other RNA
agactgaacgccgctctcagggagaag

SEQ ID NO: 75324 - RNA, 27 nt, synthetic construct
  misc_feature 1..27: note = Cytochrome c oxidase subunit 5A, mitochondrial (98-106)
  source 1..27: mol_type = other RNA
agactgaacgacttcgccagcaccgtg

SEQ ID NO: 75325 - RNA, 27 nt, synthetic construct
  misc_feature 1..27: note = Spectrin beta chain, non-erythrocytic 1 (2278-2286)
  source 1..27: mol_type = other RNA
agactgaacgacggcaatgagtacctc

SEQ ID NO: 75326 - RNA, 30 nt, synthetic construct
  misc_feature 1..30: note = V-type proton ATPase subunit H (382-391)
  source 1..30: mol_type = other RNA
agactgaacgagaagaattacgaactcctt

SEQ ID NO: 75327 - RNA, 33 nt, synthetic construct
  misc_feature 1..33: note = Pyruvate kinase PKM (73-83)
  source 1..33: mol_type = other RNA
agactgaacttcagccacggcacccatgagtac

SEQ ID NO: 75328 - RNA, 36 nt, synthetic construct
  misc_feature 1..36: note = 60S acidic ribosomal protein P2 (38-49)
  source 1..36: mol_type = other RNA
agactgaacaaggtgatcagcgagctcaatggcaaa

SEQ ID NO: 75329 - RNA, 27 nt, synthetic construct
  misc_feature 1..27: note = Midasin (2183-2191)
  source 1..27: mol_type = other RNA
agactgaacaataagatcaacagctac

SEQ ID NO: 75330 - RNA, 33 nt, synthetic construct
  misc_feature 1..33: note = RalBP1-associated Eps domain-containing protein 1 (712-722)
  source 1..33: mol_type = other RNA
agactgaacagcgagctccagcaacagcttaag

SEQ ID NO: 75331 - RNA, 30 nt, synthetic construct
  misc_feature 1..30: note = Testis-expressed sequence 10 protein (473-482)
  source 1..30: mol_type = other RNA
agactgaacagcaagcagctcaataggctt

SEQ ID NO: 75332 - RNA, 30 nt, synthetic construct
  misc_feature 1..30: note = Integrator complex subunit 8 (649-658)
  source 1..30: mol_type = other RNA
agactgcccgacatccctctcaggcaggtg

SEQ ID NO: 75333 - RNA, 33 nt, synthetic construct
  misc_feature 1..33: note = Protrudin (48-58)
  source 1..33: mol_type = other RNA
agactgcccgacagcgagctcatgaggcggaag

SEQ ID NO: 75334 - RNA, 33 nt, synthetic construct
  misc_feature 1..33: note = Beta-1,3-N-acetylglucosaminyltransferase radical fringe (267-277)
  source 1..33: mol_type = other RNA
agactgccccctgacaccctccttcagcaagtg

SEQ ID NO: 75335 - RNA, 27 nt, synthetic construct
  misc_feature 1..27: note = F-actin-capping protein subunit beta (41-49)
  source 1..27: mol_type = other RNA
agactgccccctcagcaaatcgagaag

SEQ ID NO: 75336 - RNA, 39 nt, synthetic construct
  misc_feature 1..39: note = Transmembrane protein 51 (123-135)
  source 1..39: mol_type = other RNA
agactgccccagggcaccatgttccctgccacaaggaag

SEQ ID NO: 75337 - RNA, 27 nt, synthetic construct
  misc_feature 1..27: note = Inactive tyrosine-protein kinase 7 (362-370)
  source 1..27: mol_type = other RNA
agactgcccacccacggcagggtgtac

SEQ ID NO: 75338 - RNA, 27 nt, synthetic construct
  misc_feature 1..27: note = Bridging integrator 3 (137-145)
  source 1..27: mol_type = other RNA
agactgcaggccaaggtggagaaatac

SEQ ID NO: 75339 - RNA, 30 nt, synthetic construct
  misc_feature 1..30: note = Nck-associated protein 1 (492-501)
  source 1..30: mol_type = other RNA
agactgcaggcctacaccagcgtgtccaag

SEQ ID NO: 75340 - RNA, 27 nt, synthetic construct
  misc_feature 1..27: note = Scavenger receptor class A member 5 (244-252)
  source 1..27: mol_type = other RNA
agactgcaggacctcagggtgcttgtc

SEQ ID NO: 75341 - RNA, 39 nt, synthetic construct
  misc_feature 1..39: note = Protein FAM167A (131-143)
  source 1..39: mol_type = other RNA
agactgcaggaccaacagctcgccaggcagcttatgcgg

SEQ ID NO: 75342 - RNA, 30 nt, synthetic construct
  misc_feature 1..30: note = KH domain-containing, RNA-binding, signal transduction-associated protein 1 (186-195)
  source 1..30: mol_type = other RNA
agactgcaggaggaaaccggcgccaagatc

SEQ ID NO: 75343 - RNA, 27 nt, synthetic construct
  misc_feature 1..27: note = 26S proteasome non-ATPase regulatory subunit 12 (39-47)
  source 1..27: mol_type = other RNA
agactgcaggaggtgatcgaaaccctc

SEQ ID NO: 75344 - RNA, 33 nt, synthetic construct
  misc_feature 1..33: note = Sentrin-specific protease 6 (172-182)
  source 1..33: mol_type = other RNA
agactgcagggcgtggagaggatcatgaagaaa

SEQ ID NO: 75345 - RNA, 36 nt, synthetic construct
  misc_feature 1..36: note = 60S ribosomal protein L10 (109-120)
  source 1..36: mol_type = other RNA
agactgcagaccggcatgaggggggccttcggaaag

SEQ ID NO: 75346 - RNA, 30 nt, synthetic construct
  misc_feature 1..30: note = Integrin beta-3 (117-126)
  source 1..30: mol_type = other RNA
agactgaggcccgacgatagcaagaacttc

SEQ ID NO: 75347 - RNA, 30 nt, synthetic construct
  misc_feature 1..30: note = Protogenin (10-19)
  source 1..30: mol_type = other RNA
agactgaggccccctggcatgctccttcgg

SEQ ID NO: 75348 - RNA, 33 nt, synthetic construct
  misc_feature 1..33: note = DNA replication licensing factor MCM5 (573-583)
  source 1..33: mol_type = other RNA
agactgagcgccgaggctgcagaaaagctcaaa

SEQ ID NO: 75349 - RNA, 36 nt, synthetic construct
  misc_feature 1..36: note = EF-hand domain-containing protein D2 (176-187)
  source 1..36: mol_type = other RNA
agactgagcgagatcgacgtgtcctctgaaggcgtc

SEQ ID NO: 75350 - RNA, 27 nt, synthetic construct
  misc_feature 1..27: note = MICOS complex subunit MIC25 (29-37)
  source 1..27: mol_type = other RNA
agactgagcgagaacgtggtcaatagg

SEQ ID NO: 75351 - RNA, 27 nt, synthetic construct
  misc_feature 1..27: note = Neuron navigator 2 (2169-2177)
  source 1..27: mol_type = other RNA
agactgagcgagtacatcgtgctcagg

SEQ ID NO: 75352 - RNA, 33 nt, synthetic construct
  misc_feature 1..33: note = Serine palmitoyltransferase 2 (212-222)
  source 1..33: mol_type = other RNA
agactgagcggcgccaccatcaggattttcaag

SEQ ID NO: 75353 - RNA, 27 nt, synthetic construct
  misc_feature 1..27: note = T-complex protein 1 subunit delta (435-443)
  source 1..27: mol_type = other RNA
agactgaccgagtacagcaggacactc

SEQ ID NO: 75354 - RNA, 27 nt, synthetic construct
  misc_feature 1..27: note = 60S ribosomal protein L36 (32-40)
  source 1..27: mol_type = other RNA
agactgaccaagcacacaaaattcgtg

SEQ ID NO: 75355 - RNA, 27 nt, synthetic construct
  misc_feature 1..27: note = Centromere protein F (420-428)
  source 1..27: mol_type = other RNA
agactgacccaggagctccaacaggcc

SEQ ID NO: 75356 - RNA, 30 nt, synthetic construct
  misc_feature 1..30: note = Spectrin beta chain, non-erythrocytic 1 (2078-2087)
  source 1..30: mol_type = other RNA
agactgaccacactcgagcttctggaagtg

SEQ ID NO: 75357 - RNA, 39 nt, synthetic construct
  misc_feature 1..39: note = Disintegrin and metalloproteinase domain-containing protein 10 (389-401)
  source 1..39: mol_type = other RNA
agactggtggacgccgatggccccctcgctaggcttaag

SEQ ID NO: 75358 - RNA, 33 nt, synthetic construct
  misc_feature 1..33: note = DNA mismatch repair protein Mlh1 (265-275)
  source 1..33: mol_type = other RNA
agactggtggagagcacctccctcaggaaggcc

SEQ ID NO: 75359 - RNA, 27 nt, synthetic construct
  misc_feature 1..27: note = Coiled-coil domain-containing protein 144A (749-757)
  source 1..27: mol_type = other RNA
agactggtgaaggagctcaggaccgtc

SEQ ID NO: 75360 - RNA, 39 nt, synthetic construct
  misc_feature 1..39: note = Sialidase-3 (111-123)
  source 1..39: mol_type = other RNA
agactggtgagcaactcctggacccaggccatcctcaag

SEQ ID NO: 75361 - RNA, 27 nt, synthetic construct
  misc_feature 1..27: note = Uridine phosphorylase 1 (90-98)
  source 1..27: mol_type = other RNA
agactggtgagctacttcatcaagaaa

SEQ ID NO: 75362 - RNA, 27 nt, synthetic construct
  misc_feature 1..27: note = Cryptochrome-2 (155-163)
  source 1..27: mol_type = other RNA
agactgtgggacctctacaagaaagtg

SEQ ID NO: 75363 - RNA, 45 nt, synthetic construct
  misc_feature 1..45: note = Ribosome biogenesis protein WDR12 (322-336)
  source 1..45: mol_type = other RNA
agactgtgggaccccaggaccaaggatggcagcctcgtgtccctt

SEQ ID NO: 75364 - RNA, 30 nt, synthetic construct
  misc_feature 1..30: note = Protein polybromo-1 (982-991)
  source 1..30: mol_type = other RNA
agactgtgggaggacagcgccggcgaaaag

SEQ ID NO: 75365 - RNA, 27 nt, synthetic construct
  misc_feature 1..27: note = ATP-dependent RNA helicase DDX24 (447-455)
  source 1..27: mol_type = other RNA
agactgtgggagctcatcaaggaaaaa

SEQ ID NO: 75366 - RNA, 30 nt, synthetic construct
  misc_feature 1..30: note = DnaJ homolog subfamily C member 4 (11-20)
  source 1..30: mol_type = other RNA
agactgtggcccaggaaccctccaagccgg

SEQ ID NO: 75367 - RNA, 36 nt, synthetic construct
  misc_feature 1..36: note = Multifunctional protein ADE2 (215-226)
  source 1..36: mol_type = other RNA
agactgtggcccagcggcgacaggtcccagcaaaag

SEQ ID NO: 75368 - RNA, 33 nt, synthetic construct
  misc_feature 1..33: note = 39S ribosomal protein L37, mitochondrial (162-172)
  source 1..33: mol_type = other RNA
agactgtggcagaccacagaggaaatccccaag

SEQ ID NO: 75369 - RNA, 30 nt, synthetic construct
  misc_feature 1..30: note = Protein phosphatase Slingshot homolog 1 (144-153)
  source 1..30: mol_type = other RNA
agactgtggagcgacaccaagatccacctc

SEQ ID NO: 75370 - RNA, 30 nt, synthetic construct
  misc_feature 1..30: note = Inositol 1,4,5-trisphosphate receptor type 1 (806-815)
  source 1..30: mol_type = other RNA
agactgtggagcgagatcccctccgaaatt

SEQ ID NO: 75371 - RNA, 30 nt, synthetic construct
  misc_feature 1..30: note = E3 ubiquitin-protein ligase Mdm2 (71-80)
  source 1..30: mol_type = other RNA
agactgtacgacgagaagcagcaacacatc

SEQ ID NO: 75372 - RNA, 36 nt, synthetic construct
  misc_feature 1..36: note = E3 ubiquitin-protein ligase Mdm2 (65-76)
  source 1..36: mol_type = other RNA
agactgtacgacgagaagcagcaacacatcgtgtat

SEQ ID NO: 75373 - RNA, 33 nt, synthetic construct
  misc_feature 1..33: note = ATP-binding cassette sub-family B member 10, mitochondrial (542-552)
  source 1..33: mol_type = other RNA
agactgtacgaccccgccagcggcaccatctcc

SEQ ID NO: 75374 - RNA, 30 nt, synthetic construct
  misc_feature 1..30: note = MICOS complex subunit MIC26 (165-174)
  source 1..30: mol_type = other RNA
agactgtacgactggggcctcagggggtat

SEQ ID NO: 75375 - RNA, 27 nt, synthetic construct
  misc_feature 1..27: note = ADP-ribosylation factor-like protein 4D (182-190)
  source 1..27: mol_type = other RNA
agactgtacgagatgatcctcaagagg

SEQ ID NO: 75376 - RNA, 39 nt, synthetic construct
  misc_feature 1..39: note = Probable fibrosin-1 (306-318)
  source 1..39: mol_type = other RNA
agactgtacggcctcgagcccgcccaccctcttctgtat

SEQ ID NO: 75377 - RNA, 30 nt, synthetic construct
  misc_feature 1..30: note = Tubulin-specific chaperone C (217-226)
  source 1..30: mol_type = other RNA
agactgtacggcaaccccaataccctcagg

SEQ ID NO: 75378 - RNA, 27 nt, synthetic construct
  misc_feature 1..27: note = Tubulin polyglutamylase TTLL7 (399-407)
  source 1..27: mol_type = other RNA
agactgtacggccagaacagcatcaag

SEQ ID NO: 75379 - RNA, 27 nt, synthetic construct
  misc_feature 1..27: note = Condensin-2 complex subunit G2 (329-337)
  source 1..27: mol_type = other RNA
agactgtacaagcccatcctctggagg

SEQ ID NO: 75380 - RNA, 27 nt, synthetic construct
  misc_feature 1..27: note = Partitioning defective 6 homolog beta (159-167)
  source 1..27: mol_type = other RNA
agactgtacaagtatggcaccgagaaa

SEQ ID NO: 75381 - RNA, 30 nt, synthetic construct
  misc_feature 1..30: note = HCG2002594, isoform CRA_c (311-320)
  source 1..30: mol_type = other RNA
agactgtacccctggggcatcgtggaggtc

SEQ ID NO: 75382 - RNA, 24 nt, synthetic construct
  misc_feature 1..24: note = Conserved oligomeric Golgi complex subunit 4 (121-128)
  source 1..24: mol_type = other RNA
agactgtaccaggccatccaaagg

SEQ ID NO: 75383 - RNA, 33 nt, synthetic construct
  misc_feature 1..33: note = Proteasome subunit alpha type-7 (143-153)
  source 1..33: mol_type = other RNA
agactgtaccagaccgaccccagcggcacatat

SEQ ID NO: 75384 - RNA, 27 nt, synthetic construct
  misc_feature 1..27: note = Coiled-coil domain-containing protein 77 (127-135)
  source 1..27: mol_type = other RNA
agactgtacagcgagaacgacaggctc

SEQ ID NO: 75385 - RNA, 30 nt, synthetic construct
  misc_feature 1..30: note = 39S ribosomal protein L17, mitochondrial (74-83)
  source 1..30: mol_type = other RNA
agaatggccgacttctggctgaccgagaag

SEQ ID NO: 75386 - RNA, 39 nt, synthetic construct
  misc_feature 1..39: note = Coiled-coil-helix-coiled-coil-helix domain-containing protein 2 (11-23)
  source 1..39: mol_type = other RNA
agaatggccccccctgctagcagggcaccacagatgcgg

SEQ ID NO: 75387 - RNA, 27 nt, synthetic construct
  misc_feature 1..27: note = Exportin-1 (44-52)
  source 1..27: mol_type = other RNA
agaatggcccaggaggtgctgacccac

SEQ ID NO: 75388 - RNA, 30 nt, synthetic construct
  misc_feature 1..30: note = Lon protease homolog 2, peroxisomal (632-641)
  source 1..30: mol_type = other RNA
agaatggacggcgaggggcagctgaccctc

SEQ ID NO: 75389 - RNA, 27 nt, synthetic construct
  misc_feature 1..27: note = DNA mismatch repair protein Msh3 (448-456)
  source 1..27: mol_type = other RNA
agaatggacaacatctacttcgagtat

SEQ ID NO: 75390 - RNA, 36 nt, synthetic construct
  misc_feature 1..36: note = 39S ribosomal protein L51, mitochondrial (101-112)
  source 1..36: mol_type = other RNA
agaatgttcgccgacgatctgcacaacctcaataag

SEQ ID NO: 75391 - RNA, 33 nt, synthetic construct
  misc_feature 1..33: note = 60S ribosomal protein L4 (100-110)
  source 1..33: mol_type = other RNA
agaatgttcgcccccaccaagacatggaggcgg

SEQ ID NO: 75392 - RNA, 27 nt, synthetic construct
  misc_feature 1..27: note = Zinc finger BED domain-containing protein 5 (228-236)
  source 1..27: mol_type = other RNA
agaatgttcgacgagcagtacagcaag

SEQ ID NO: 75393 - RNA, 33 nt, synthetic construct
  misc_feature 1..33: note = HLA class II histocompatibility antigen, DP alpha 1 chain (6-16)
  source 1..33: mol_type = other RNA
agaatgttccacatcagggccgtgattctgcgg

SEQ ID NO: 75394 - RNA, 30 nt, synthetic construct
  misc_feature 1..30: note = Protein Shroom2 (323-332)
  source 1..30: mol_type = other RNA
agaatgttcatcggcgacctggataaggtg

SEQ ID NO: 75395 - RNA, 30 nt, synthetic construct
  misc_feature 1..30: note = Cullin-1 (506-515)
  source 1..30: mol_type = other RNA
agaatgttccaggacatcggcgtgagcaag

SEQ ID NO: 75396 - RNA, 36 nt, synthetic construct
  misc_feature 1..36: note = EPM2A-interacting protein 1 (249-260)
  source 1..36: mol_type = other RNA
agaatgatcggcgagaacagcgggctggtgtcctac

SEQ ID NO: 75397 - RNA, 30 nt, synthetic construct
  misc_feature 1..30: note = Leucine-rich repeat and WD repeat-containing protein 1 (193-202)
  source 1..30: mol_type = other RNA
agaatgatcagcgaggaactggtggccgct

SEQ ID NO: 75398 - RNA, 30 nt, synthetic construct
  misc_feature 1..30: note = Endoplasmin (509-518)
  source 1..30: mol_type = other RNA
agaatgaaggagaaacaggacaagatctac

SEQ ID NO: 75399 - RNA, 33 nt, synthetic construct
  misc_feature 1..33: note = Heat shock protein HSP 90-alpha (605-615)
  source 1..33: mol_type = other RNA
agaatgaaggagaaccagaaacacatctactat

SEQ ID NO: 75400 - RNA, 30 nt, synthetic construct
  misc_feature 1..30: note = Heat shock protein HSP 90-beta (401-410)
  source 1..30: mol_type = other RNA
agaatgaaggagacccagaaaagcatctac

SEQ ID NO: 75401 - RNA, 33 nt, synthetic construct
  misc_feature 1..33: note = Heat shock protein HSP 90-beta (401-411)
  source 1..33: mol_type = other RNA
agaatgaaggagacccagaaaagcatctactat

SEQ ID NO: 75402 - RNA, 30 nt, synthetic construct
  misc_feature 1..30: note = 60S ribosomal protein L39 (28-37)
  source 1..30: mol_type = other RNA
agaatgaagaccggcaacaaaatcaggtac

SEQ ID NO: 75403 - RNA, 27 nt, synthetic construct
  misc_feature 1..27: note = Liprin-alpha-4 (339-347)
  source 1..27: mol_type = other RNA
agaatgctggaccacctcaccaagaaa

SEQ ID NO: 75404 - RNA, 30 nt, synthetic construct
  misc_feature 1..30: note = Eukaryotic translation initiation factor 3 subunit A (752-761)
  source 1..30: mol_type = other RNA
agaatgctggaggacagggatctcttcgtg

SEQ ID NO: 75405 - RNA, 27 nt, synthetic construct
  misc_feature 1..27: note = Proteasome subunit beta type-7 (103-111)
  source 1..27: mol_type = other RNA
agaatgctgaagcagatgctcttcagg

SEQ ID NO: 75406 - RNA, 33 nt, synthetic construct
  misc_feature 1..33: note = cDNA FLJ78342 (112-122)
  source 1..33: mol_type = other RNA
agaatgctgcagatcagcgagtcctctttcctc

SEQ ID NO: 75407 - RNA, 33 nt, synthetic construct
  misc_feature 1..33: note = rRNA-processing protein FCF1 homolog (15-25)
  source 1..33: mol_type = other RNA
agaatgctgagcctcagggaccagcggcttaag

SEQ ID NO: 75408 - RNA, 30 nt, synthetic construct
  misc_feature 1..30: note = Meiotic nuclear division protein 1 homolog (15-24)
  source 1..30: mol_type = other RNA
agaatgatggagatcttcagcgaaaccaag

SEQ ID NO: 75409 - RNA, 33 nt, synthetic construct
  misc_feature 1..33: note = Zinc finger FYVE domain-containing protein 16 (812-822)
  source 1..33: mol_type = other RNA
agaatgatgagccccaccggctccaacctgaag

SEQ ID NO: 75410 - RNA, 27 nt, synthetic construct
  misc_feature 1..27: note = DNA replication ATP-dependent helicase/nuclease DNA2 (828-836)
  source 1..27: mol_type = other RNA
agaatgaacagcaagatcatgtccctg

SEQ ID NO: 75411 - RNA, 33 nt, synthetic construct
  misc_feature 1..33: note = WAS protein family homolog 1 (5-15)
  source 1..33: mol_type = other RNA
agaatgcagcacagcctggccggccaaacctac

SEQ ID NO: 75412 - RNA, 27 nt, synthetic construct
  misc_feature 1..27: note = Neuron navigator 2 (1941-1949)
  source 1..27: mol_type = other RNA
agaatgcagagcgagatcgaaaagctg

SEQ ID NO: 75413 - RNA, 27 nt, synthetic construct
  misc_feature 1..27: note = 28 kDa heat- and acid-stable phosphoprotein (173-181)
  source 1..27: mol_type = other RNA
agaatgcagagcctgtccctcaacaag

SEQ ID NO: 75414 - RNA, 39 nt, synthetic construct
  misc_feature 1..39: note = cDNA FLJ57726, highly similar to Heterogeneous nuclear ribonucleoprotein H3 (32-44)
  source 1..39: mol_type = other RNA
agaatgagggacggccgggggatgggaggtcacggctac

SEQ ID NO: 75415 - RNA, 27 nt, synthetic construct
  misc_feature 1..27: note = Histone-lysine N-methyltransferase EHMT2 (42-50)
  source 1..27: mol_type = other RNA
agaatgagcgacgatgtgcactccctg

SEQ ID NO: 75416 - RNA, 27 nt, synthetic construct
  misc_feature 1..27: note = La-related protein 4 (502-510)
  source 1..27: mol_type = other RNA
agaatgagcgacgtggtcaagggcgtt

SEQ ID NO: 75417 - RNA, 48 nt, synthetic construct
  misc_feature 1..48: note = Casein kinase I isoform delta (394-409)
  source 1..48: mol_type = other RNA
agaatgagcacctcccagaactctatccccttcgagcaccatggcaag

SEQ ID NO: 75418 - RNA, 27 nt, synthetic construct
  misc_feature 1..27: note = Nucleophosmin (277-285)
  source 1..27: mol_type = other RNA
agaatgaccgaccaggaggccatccaa

SEQ ID NO: 75419 - RNA, 30 nt, synthetic construct
  misc_feature 1..30: note = DNA mismatch repair protein Msh6 (302-311)
  source 1..30: mol_type = other RNA
agaatggtgaccggcaacgggagcctgaag

SEQ ID NO: 75420 - RNA, 33 nt, synthetic construct
  misc_feature 1..33: note = Mesencephalic astrocyte-derived neurotrophic factor (3-13)
  source 1..33: mol_type = other RNA
agaatgtgggccacccagggcctggctgtggca

SEQ ID NO: 75421 - RNA, 27 nt, synthetic construct
  misc_feature 1..27: note = Arginine/serine-rich coiled-coil protein 2 (170-178)
  source 1..27: mol_type = other RNA
agaaacctggacgcccagtacgagatg

SEQ ID NO: 75422 - RNA, 51 nt, synthetic construct
  misc_feature 1..51: note = Melanocyte protein PMEL (241-257)
  source 1..51: mol_type = other RNA
agaaaccagcccctgaccttcgccctccaacttcacgaccctagcggctac

SEQ ID NO: 75423 - RNA, 27 nt, synthetic construct
  misc_feature 1..27: note = Keratin, type I cytoskeletal 10 (99-107)
  source 1..27: mol_type = other RNA
agaaacgtgagcaccggcgacgtcaat

SEQ ID NO: 75424 - RNA, 27 nt, synthetic construct
  misc_feature 1..27: note = Dystonin (4836-4844)
  source 1..27: mol_type = other RNA
agacaggccgaggaattccacagcgtg

SEQ ID NO: 75425 - RNA, 27 nt, synthetic construct
  misc_feature 1..27: note = Stathmin-3 (130-138)
  source 1..27: mol_type = other RNA
agacaggccgaggaaaagctgaactac

SEQ ID NO: 75426 - RNA, 27 nt, synthetic construct
  misc_feature 1..27: note = Elongation factor 1-gamma (99-107)
  source 1..27: mol_type = other RNA
agacaggccttccccaacaccaatagg

SEQ ID NO: 75427 - RNA, 27 nt, synthetic construct
  misc_feature 1..27: note = A-kinase anchor protein 10, mitochondrial (481-489)
  source 1..27: mol_type = other RNA
agacaggcctggaccacaatggagaag

SEQ ID NO: 75428 - RNA, 27 nt, synthetic construct
  misc_feature 1..27: note = Vimentin (207-215)
  source 1..27: mol_type = other RNA
agacaggacgtggataacgccagcctg

SEQ ID NO: 75429 - RNA, 27 nt, synthetic construct
  misc_feature 1..27: note = Acidic fibroblast growth factor intracellular-binding protein (136-144)
  source 1..27: mol_type = other RNA
agacagttcgacaactttaagagggtg

SEQ ID NO: 75430 - RNA, 24 nt, synthetic construct
  misc_feature 1..24: note = Lysine-specific demethylase 5B (878-885)
  source 1..24: mol_type = other RNA
agacagttcgtgacccaactgtac

SEQ ID NO: 75431 - RNA, 27 nt, synthetic construct
  misc_feature 1..27: note = Fibronectin type III domain-containing protein 3B (198-206)
  source 1..27: mol_type = other RNA
agacagatcgacaggcaaaaccggctg

SEQ ID NO: 75432 - RNA, 30 nt, synthetic construct
  misc_feature 1..30: note = Cytochrome P450 2U1 (288-297)
  source 1..30: mol_type = other RNA
agacagatcgagaaggacattaccagcttc

SEQ ID NO: 75433 - RNA, 24 nt, synthetic construct
  misc_feature 1..24: note = Interferon alpha-inducible protein 6 (2-9)
  source 1..24: mol_type = other RNA
agacagaaggccgtgagcctgttc

SEQ ID NO: 75434 - RNA, 27 nt, synthetic construct
  misc_feature 1..27: note = THAP domain-containing protein 1 (175-183)
  source 1..27: mol_type = other RNA
agacagctggagaagctcaaagaagtg

SEQ ID NO: 75435 - RNA, 33 nt, synthetic construct
  misc_feature 1..33: note = 3-hydroxy-3-methylglutaryl-coenzyme A reductase (84-94)
  source 1..33: mol_type = other RNA
agacagctgggcagcaagtacatcctcgggatt

SEQ ID NO: 75436 - RNA, 27 nt, synthetic construct
  misc_feature 1..27: note = Protein FAM32A (72-80)
  source 1..27: mol_type = other RNA
agacagatggagaggatcctgaagaaa

SEQ ID NO: 75437 - RNA, 27 nt, synthetic construct
  misc_feature 1..27: note = Splicing factor 3A subunit 1 (72-80)
  source 1..27: mol_type = other RNA
agacagaacgagatcaataaccccaag

SEQ ID NO: 75438 - RNA, 27 nt, synthetic construct
  misc_feature 1..27: note = Spectrin beta chain, non-erythrocytic 1 (1161-1169)
  source 1..27: mol_type = other RNA
agacagaacctgctcagccaatcccac

SEQ ID NO: 75439 - RNA, 27 nt, synthetic construct
  misc_feature 1..27: note = Unconventional myosin-X (252-260)
  source 1..27: mol_type = other RNA
agacagaaccccggcgagaggaattac

SEQ ID NO: 75440 - RNA, 30 nt, synthetic construct
  misc_feature 1..30: note = Phosphatidylinositol-binding clathrin assembly protein (139-148)
  source 1..30: mol_type = other RNA
agacaggtggccttcgactttaccaaggtc

SEQ ID NO: 75441 - RNA, 27 nt, synthetic construct
  misc_feature 1..27: note = Hom s 2 (98-106)
  source 1..27: mol_type = other RNA
agacaggtgaccggcgtcacaagggtt

SEQ ID NO: 75442 - RNA, 30 nt, synthetic construct
  misc_feature 1..30: note = Alpha-actinin-1 (672-681)
  source 1..30: mol_type = other RNA
agacagtacgagaagagcatcgtgaactat

SEQ ID NO: 75443 - RNA, 27 nt, synthetic construct
  misc_feature 1..27: note = Protein CREG2 (251-259)
  source 1..27: mol_type = other RNA
agacagtacgagtggttctttatgaag

SEQ ID NO: 75444 - RNA, 27 nt, synthetic construct
  misc_feature 1..27: note = Transmembrane emp24 domain-containing protein 4 (92-100)
  source 1..27: mol_type = other RNA
agacagtacggcagcgaggggaggttc

SEQ ID NO: 75445 - RNA, 27 nt, synthetic construct
  misc_feature 1..27: note = Bromodomain adjacent to zinc finger domain protein 2B (487-495)
  source 1..27: mol_type = other RNA
agacagtaccccgaggtgatcaagtat

SEQ ID NO: 75446 - RNA, 27 nt, synthetic construct
  misc_feature 1..27: note = Myb-binding protein 1A (59-67)
  source 1..27: mol_type = other RNA
agaagggacttccagatccgggtgctg

SEQ ID NO: 75447 - RNA, 27 nt, synthetic construct
  misc_feature 1..27: note = FLYWCH-type zinc finger-containing protein 1 (137-145)
  source 1..27: mol_type = other RNA
agaaggggccccgggcctctgaccctc

SEQ ID NO: 75448 - RNA, 27 nt, synthetic construct
  misc_feature 1..27: note = NEDD8 ultimate buster 1 (431-439)
  source 1..27: mol_type = other RNA
agaaggctggagaacatccggttcctc

SEQ ID NO: 75449 - RNA, 27 nt, synthetic construct
  misc_feature 1..27: note = Tribbles homolog 2 (31-39)
  source 1..27: mol_type = other RNA
agaagcgccgagccctcccagtctttc

SEQ ID NO: 75450 - RNA, 27 nt, synthetic construct
  misc_feature 1..27: note = Adenylate kinase 2, mitochondrial (175-183)
  source 1..27: mol_type = other RNA
agaagcgacgataacgagaaggccctg

SEQ ID NO: 75451 - RNA, 33 nt, synthetic construct
  misc_feature 1..33: note = Rhomboid-like protein (64-74)
  source 1..33: mol_type = other RNA
agaagcgaccccggcacctccggggaggcctac

SEQ ID NO: 75452 - RNA, 33 nt, synthetic construct
  misc_feature 1..33: note = THO complex subunit 5 homolog (27-37)
  source 1..33: mol_type = other RNA
agaagcgacaccgagcaggaaggcaagtactat

SEQ ID NO: 75453 - RNA, 27 nt, synthetic construct
  misc_feature 1..27: note = Serine/threonine-protein kinase VRK2 (112-120)
  source 1..27: mol_type = other RNA
agaagcgacgtggagatcctgggctac

SEQ ID NO: 75454 - RNA, 39 nt, synthetic construct
  misc_feature 1..39: note = Eukaryotic translation initiation factor 3 subunit E (431-443)
  source 1..39: mol_type = other RNA
agaagcgaggcccccaactgggctacccaggactccggc

SEQ ID NO: 75455 - RNA, 39 nt, synthetic construct
  misc_feature 1..39: note = Annexin A1 (303-315)
  source 1..39: mol_type = other RNA
agaagcgagatcgacatgaacgatattaaggccttctac

SEQ ID NO: 75456 - RNA, 30 nt, synthetic construct
  misc_feature 1..30: note = Protein LAP2 (1012-1021)
  source 1..30: mol_type = other RNA
agaagcgagtccaccgaaaaccagtcttac

SEQ ID NO: 75457 - RNA, 27 nt, synthetic construct
  misc_feature 1..27: note = Zinc finger and BTB domain-containing protein 17 (362-370)
  source 1..27: mol_type = other RNA
agaagcttctccgaccccacctctaag

SEQ ID NO: 75458 - RNA, 33 nt, synthetic construct
  misc_feature 1..33: note = Acyl-coenzyme A thioesterase THEM4 (34-44)
  source 1..33: mol_type = other RNA
agaagcttctcctctgaggaagtgatcctgaag

SEQ ID NO: 75459 - RNA, 27 nt, synthetic construct
  misc_feature 1..27: note = Hypoxia-inducible factor 1-alpha (30-38)
  source 1..27: mol_type = other RNA
agaagcaaggagtccgaagtgttctac

SEQ ID NO: 75460 - RNA, 27 nt, synthetic construct
  misc_feature 1..27: note = Tubulin-tyrosine ligase-like protein 12 (425-433)
  source 1..27: mol_type = other RNA
agaagcctggacacccacgtgacaaag

SEQ ID NO: 75461 - RNA, 33 nt, synthetic construct
  misc_feature 1..33: note = UHRF1-binding protein 1 (558-568)
  source 1..33: mol_type = other RNA
agaagcctggagcagttcaaggccatctacaaa

SEQ ID NO: 75462 - RNA, 27 nt, synthetic construct
  misc_feature 1..27: note = EWS RNA-binding protein variant 6 (391-399)
  source 1..27: mol_type = other RNA
agaagcctgaggtactattacgagaag

SEQ ID NO: 75463 - RNA, 33 nt, synthetic construct
  misc_feature 1..33: note = Transmembrane protein 131 (709-719)
  source 1..33: mol_type = other RNA
agaagcctgtccgaggacgtgaggttctactat

SEQ ID NO: 75464 - RNA, 27 nt, synthetic construct
  misc_feature 1..27: note = Solute carrier family 25 member 35 (270-278)
  source 1..27: mol_type = other RNA
agaagcctgtactataccgacacaaag

SEQ ID NO: 75465 - RNA, 27 nt, synthetic construct
  misc_feature 1..27: note = Phospholipid hydroperoxide glutathione peroxidase, mitochondrial (39-47)
  source 1..27: mol_type = other RNA
agaagcatgcacgagttctccgccaag

SEQ ID NO: 75466 - RNA, 27 nt, synthetic construct
  misc_feature 1..27: note = Ubiquitin-like protein 7 (210-218)
  source 1..27: mol_type = other RNA
agaagcatgccctcctcttcatacagg

SEQ ID NO: 75467 - RNA, 27 nt, synthetic construct
  misc_feature 1..27: note = Baculoviral IAP repeat-containing protein 6 (3123-3131)
  source 1..27: mol_type = other RNA
agaagcatggtgtccaccatcatgaag

SEQ ID NO: 75468 - RNA, 27 nt, synthetic construct
  misc_feature 1..27: note = Testis-specific Y-encoded protein 1 (206-214)
  source 1..27: mol_type = other RNA
agaagcaacccctacttccagaataag

SEQ ID NO: 75469 - RNA, 27 nt, synthetic construct
  misc_feature 1..27: note = Eukaryotic translation initiation factor 2 subunit 2 (285-293)
  source 1..27: mol_type = other RNA
agaagccccgacaccatcctgcagaag

SEQ ID NO: 75470 - RNA, 36 nt, synthetic construct
  misc_feature 1..36: note = Myb-binding protein 1A (545-556)
  source 1..36: mol_type = other RNA
agaagcccctccctgctccagtctggcgccaagaaa

SEQ ID NO: 75471 - RNA, 30 nt, synthetic construct
  misc_feature 1..30: note = Histone acetyltransferase KAT2A (279-288)
  source 1..30: mol_type = other RNA
agaagccaggccgaggacgtggctacctac

SEQ ID NO: 75472 - RNA, 27 nt, synthetic construct
  misc_feature 1..27: note = Sorting nexin-17 (193-201)
  source 1..27: mol_type = other RNA
agaagccaggagtacaagatcgtgctg

SEQ ID NO: 75473 - RNA, 48 nt, synthetic construct
  misc_feature 1..48: note = Cold-inducible RNA-binding protein (145-160)
  source 1..48: mol_type = other RNA
agaagccagtccggcgggtactctgacaggtcaagtggaggtagctat

SEQ ID NO: 75474 - RNA, 39 nt, synthetic construct
  misc_feature 1..39: note = Heterogeneous nuclear ribonucleoprotein A1-like 2 (131-143)
  source 1..39: mol_type = other RNA
agaagctccggcccctacgggggaggtggccagtatttc

SEQ ID NO: 75475 - RNA, 27 nt, synthetic construct
  misc_feature 1..27: note = Solute carrier family 22 member 18 (22-30)
  source 1..27: mol_type = other RNA
agaagctccgtgatcctgctcacctac

SEQ ID NO: 75476 - RNA, 30 nt, synthetic construct
  misc_feature 1..30: note = Lysine-specific histone demethylase 1A (632-641)
  source 1..30: mol_type = other RNA
agaagcacctcccagacattcatctacaag

SEQ ID NO: 75477 - RNA, 27 nt, synthetic construct
  misc_feature 1..27: note = Butyrophilin subfamily 2 member A2 (135-143)
  source 1..27: mol_type = other RNA
agaagctacgacgaggccatcctgagg

SEQ ID NO: 75478 - RNA, 30 nt, synthetic construct
  misc_feature 1..30: note = Butyrophilin subfamily 2 member A2 (135-144)
  source 1..30: mol_type = other RNA
agaagctacgacgaggccatcctgaggctc

SEQ ID NO: 75479 - RNA, 27 nt, synthetic construct
  misc_feature 1..27: note = Vacuolar protein sorting-associated protein 52 homolog (301-309)
  source 1..27: mol_type = other RNA
agaagctacctgggcaggctcatgaag

SEQ ID NO: 75480 - RNA, 33 nt, synthetic construct
  misc_feature 1..33: note = CDKN2AIP N-terminal-like protein (28-38)
  source 1..33: mol_type = other RNA
agaagctactccgagtctgaaaagcagtggaaa

SEQ ID NO: 75481 - RNA, 36 nt, synthetic construct
  misc_feature 1..36: note = Vimentin (28-39)
  source 1..36: mol_type = other RNA
agaagctacgtgaccacatccactaggacgtattct

SEQ ID NO: 75482 - RNA, 33 nt, synthetic construct
  misc_feature 1..33: note = Ribosome biogenesis protein BOP1 (9-19)
  source 1..33: mol_type = other RNA
agaaccgccgctcccagcgtgaggcctgagaag

SEQ ID NO: 75483 - RNA, 33 nt, synthetic construct
  misc_feature 1..33: note = Myelin basic protein (92-102)
  source 1..33: mol_type = other RNA
agaaccgcccactacggcagcctgccccagaag

SEQ ID NO: 75484 - RNA, 51 nt, synthetic construct
  misc_feature 1..51: note = HIRA-interacting protein 3 (190-206)
  source 1..51: mol_type = other RNA
agaaccgcctggaaccccctgggcgaggctgcacctccaggggaactctac

SEQ ID NO: 75485 - RNA, 27 nt, synthetic construct
  misc_feature 1..27: note = WD repeat-containing protein 91 (7-15)
  source 1..27: mol_type = other RNA
agaaccgacgagctggtgagggaatac

SEQ ID NO: 75486 - RNA, 27 nt, synthetic construct
  misc_feature 1..27: note = Protein FAM199X (55-63)
  source 1..27: mol_type = other RNA
agaaccgaccccctgcacaggttccat

SEQ ID NO: 75487 - RNA, 39 nt, synthetic construct
  misc_feature 1..39: note = Sodium/potassium/calcium exchanger 5 (203-215)
  source 1..39: mol_type = other RNA
agaaccgacagcggcatcttctacgaggattccgggtat

SEQ ID NO: 75488 - RNA, 36 nt, synthetic construct
  misc_feature 1..36: note = Multivesicular body subunit 12B (107-118)
  source 1..36: mol_type = other RNA
agaaccgactacgagtatcagcacagcaacctgtac

SEQ ID NO: 75489 - RNA, 30 nt, synthetic construct
  misc_feature 1..30: note = Upstream stimulatory factor 1 (52-61)
  source 1..30: mol_type = other RNA
agaaccgagaacggcgggcaggtgatgtac

SEQ ID NO: 75490 - RNA, 33 nt, synthetic construct
  misc_feature 1..33: note = Upstream stimulatory factor 2 (69-79)
  source 1..33: mol_type = other RNA
agaaccgagacaaacggcgggcaggtgacttac

SEQ ID NO: 75491 - RNA, 36 nt, synthetic construct
  misc_feature 1..36: note = Plexin-C1 (1024-1035)
  source 1..36: mol_type = other RNA
agaaccttctttcccgagagcggcgggttcacacac

SEQ ID NO: 75492 - RNA, 30 nt, synthetic construct
  misc_feature 1..30: note = Spatacsin (651-660)
  source 1..30: mol_type = other RNA
agaaccttcatgatcaagtttccctggaaa

SEQ ID NO: 75493 - RNA, 30 nt, synthetic construct
  misc_feature 1..30: note = Cytoplasmic dynein 1 heavy chain 1 (4159-4168)
  source 1..30: mol_type = other RNA
agaaccttcagctccatccccgtgtctagg

SEQ ID NO: 75494 - RNA, 27 nt, synthetic construct
  misc_feature 1..27: note = Abhydrolase domain-containing protein 2 (144-152)
  source 1..27: mol_type = other RNA
agaaccttcgtggactacgcccagaag

SEQ ID NO: 75495 - RNA, 27 nt, synthetic construct
  misc_feature 1..27: note = Probable ATP-dependent RNA helicase DDX5 (559-567)
  source 1..27: mol_type = other RNA
agaaccggcaaccccacagggacttac

SEQ ID NO: 75496 - RNA, 33 nt, synthetic construct
  misc_feature 1..33: note = Ras-related protein Rab-1B (48-58)
  source 1..33: mol_type = other RNA
agaaccatcgagctggacggcaagacaattaaa

SEQ ID NO: 75497 - RNA, 42 nt, synthetic construct
  misc_feature 1..42: note = NADH dehydrogenase (ubiquinone) 1 beta subcomplex subunit 4 (72-85)
  source 1..42: mol_type = other RNA
agaaccatcaacgtgtaccccaatttcaggcctacaccaaag

SEQ ID NO: 75498 - RNA, 39 nt, synthetic construct
  misc_feature 1..39: note = S-adenosylmethionine decarboxylase proenzyme (33-45)
  source 1..39: mol_type = other RNA
agaaccatccccaggagcgagtgggacattctgctcaag

SEQ ID NO: 75499 - RNA, 27 nt, synthetic construct
  misc_feature 1..27: note = Midasin (1582-1590)
  source 1..27: mol_type = other RNA
agaaccctgttcaagtttatgaaaaag

SEQ ID NO: 75500 - RNA, 27 nt, synthetic construct
  misc_feature 1..27: note = DNA dC-dU-editing enzyme APOBEC-3B (183-191)
  source 1..27: mol_type = other RNA
agaaccctgaaggagatcctcaggtac

SEQ ID NO: 75501 - RNA, 33 nt, synthetic construct
  misc_feature 1..33: note = Disintegrin and metalloproteinase domain-containing protein 10 (147-157)
  source 1..33: mol_type = other RNA
agaaccctgcccttccacagcgtgatctaccat

SEQ ID NO: 75502 - RNA, 33 nt, synthetic construct
  misc_feature 1..33: note = BTB/POZ domain-containing adapter for CUL3-mediated RhoA degradation protein 1 (57-67)
  source 1..33: mol_type = other RNA
agaaccctgacaggccaggacactatgctcaag

SEQ ID NO: 75503 - RNA, 42 nt, synthetic construct
  misc_feature 1..42: note = Heat shock protein HSP 90-beta (32-45)
  source 1..42: mol_type = other RNA
agaaccctgacactcgtggacactggcatcgggatgacgaag

SEQ ID NO: 75504 - RNA, 36 nt, synthetic construct
  misc_feature 1..36: note = UDP-N-acetylhexosamine pyrophosphorylase (169-180)
  source 1..36: mol_type = other RNA
agaaccatggagagcacaaaggaattctttactaaa

SEQ ID NO: 75505 - RNA, 33 nt, synthetic construct
  misc_feature 1..33: note = Hypoxia-inducible factor 1-alpha (180-190)
  source 1..33: mol_type = other RNA
agaaccatgaacatcaagagcgccacatggaaa

SEQ ID NO: 75506 - RNA, 27 nt, synthetic construct
  misc_feature 1..27: note = Spindle and centriole-associated protein 1 (657-665)
  source 1..27: mol_type = other RNA
agaaccaacgagagcctgatccagagg

SEQ ID NO: 75507 - RNA, 30 nt, synthetic construct
  misc_feature 1..30: note = COBW domain-containing protein 2 (353-362)
  source 1..30: mol_type = other RNA
agaaccaacaggctggtgctccttggccgg

SEQ ID NO: 75508 - RNA, 30 nt, synthetic construct
  misc_feature 1..30: note = Alpha-adducin (193-202)
  source 1..30: mol_type = other RNA
agaacccccagcttcctgaagaaatccaag

SEQ ID NO: 75509 - RNA, 27 nt, synthetic construct
  misc_feature 1..27: note = Programmed cell death 6-interacting protein (478-486)
  source 1..27: mol_type = other RNA
agaacccccagcaacgagctgtacaag

SEQ ID NO: 75510 - RNA, 36 nt, synthetic construct
  misc_feature 1..36: note = Leucine zipper putative tumor suppressor 1 (432-443)
  source 1..36: mol_type = other RNA
agaacccaggacctggagggcgccctcaggacaaag

SEQ ID NO: 75511 - RNA, 27 nt, synthetic construct
  misc_feature 1..27: note = Protein disulfide-isomerase A4 (155-163)
  source 1..27: mol_type = other RNA
agaacccaggaggaaatcgtggccaag

SEQ ID NO: 75512 - RNA, 33 nt, synthetic construct
  misc_feature 1..33: note = Glycerol kinase (118-128)
  source 1..33: mol_type = other RNA
agaacccagagcacagtggagtccctgtctaag

SEQ ID NO: 75513 - RNA, 30 nt, synthetic construct
  misc_feature 1..30: note = E3 ubiquitin-protein ligase DZIP3 (287-296)
  source 1..30: mol_type = other RNA
agaacccagtacaacgagcaaatcaataag

SEQ ID NO: 75514 - RNA, 27 nt, synthetic construct
  misc_feature 1..27: note = SHC SH2 domain-binding protein 1 (434-442)
  source 1..27: mol_type = other RNA
agaaccagcgccgagttcctgatgaag

SEQ ID NO: 75515 - RNA, 30 nt, synthetic construct
  misc_feature 1..30: note = Microtubule-associated protein 1B (1897-1906)
  source 1..30: mol_type = other RNA
agaaccagcgacgtgggcgggtactattac

SEQ ID NO: 75516 - RNA, 27 nt, synthetic construct
  misc_feature 1..27: note = Phosphatidylinositol 3-kinase regulatory subunit beta (469-477)
  source 1..27: mol_type = other RNA
agaaccagccaggagctgcaaatgaag

SEQ ID NO: 75517 - RNA, 33 nt, synthetic construct
  misc_feature 1..33: note = Plakophilin-4 (455-465)
  source 1..33: mol_type = other RNA
agaaccagctcccagaggtctacactgacttac

SEQ ID NO: 75518 - RNA, 27 nt, synthetic construct
  misc_feature 1..27: note = (E3-independent) E2 ubiquitin-conjugating enzyme (103-111)
  source 1..27: mol_type = other RNA
agaaccacagacatcgtgattaggata

SEQ ID NO: 75519 - RNA, 33 nt, synthetic construct
  misc_feature 1..33: note = Uncharacterized protein KIAA1211 (15-25)
  source 1..33: mol_type = other RNA
agaaccacaagctgggccaagtccaaactgttc

SEQ ID NO: 75520 - RNA, 27 nt, synthetic construct
  misc_feature 1..27: note = Eukaryotic translation initiation factor 3 subunit E (74-82)
  source 1..27: mol_type = other RNA
agaaccacagtggtcgcccagctgaag

SEQ ID NO: 75521 - RNA, 33 nt, synthetic construct
  misc_feature 1..33: note Dolichyl-diphosphooligosaccharide-proteinosyltransferase subunit 1 (38-48)
  source 1..33: mol_type = other RNA
agaaccgtggacctgagctcccacctcgccaag

SEQ ID NO: 75522 - RNA, 30 nt, synthetic construct
  misc_feature 1..30: note = 28S ribosomal protein S24, mitochondrial (77-86)
  source 1..30: mol_type = other RNA
agaaccgtggaggacgtcttcctgaggaag

SEQ ID NO: 75523 - RNA, 33 nt, synthetic construct
  misc_feature 1..33: note = Serpin B6 (125-135)
  source 1..33: mol_type = other RNA
agaaccgtggagaaggaactgacatacgagaaa

SEQ ID NO: 75524 - RNA, 30 nt, synthetic construct
  misc_feature 1..30: note = Ribosome biogenesis protein BOP1 (389-398)
  source 1..30: mol_type = other RNA
agaaccgtgcccgtcggcggggttgtgaag

SEQ ID NO: 75525 - RNA, 27 nt, synthetic construct
  misc_feature 1..27: note = Histone-lysine N-methyltransferase SETMAR (106-114)
  source 1..27: mol_type = other RNA
agaaccgtgcagtggtggttcaagaaa

SEQ ID NO: 75526 - RNA, 30 nt, synthetic construct
  misc_feature 1..30: note = Kinesin-like protein KIF22 (23-32)
  source 1..30: mol_type = other RNA
agaaccgtgacaggcgccaagcccctgaaa

SEQ ID NO: 75527 - RNA, 27 nt, synthetic construct
  misc_feature 1..27: note = Ubiquitin-like-conjugating enzyme ATG3 (198-206)
  source 1..27: mol_type = other RNA
agaacctacgacctgtatatcacatac

SEQ ID NO: 75528 - RNA, 27 nt, synthetic construct
  misc_feature 1..27: note = Phosphatidylinositol 4-kinase alpha (889-897)
  source 1..27: mol_type = other RNA
agaacctacgacatgatccagtattac

SEQ ID NO: 75529 - RNA, 33 nt, synthetic construct
  misc_feature 1..33: note = Serine-protein kinase ATM (2034-2044)
  source 1..33: mol_type = other RNA
agaacctacgagcacgaagccatgtggggcaag

SEQ ID NO: 75530 - RNA, 30 nt, synthetic construct
  misc_feature 1..30: note = Vimentin (36-45)
  source 1..30: mol_type = other RNA
agaacctacagcctgggctccgccctcagg

SEQ ID NO: 75531 - RNA, 33 nt, synthetic construct
  misc_feature 1..33: note = Protein-methionine sulfoxide oxidase MICAL3 (192-202)
  source 1..33: mol_type = other RNA
agaacctacacagaggaagagctgaacgccaag

SEQ ID NO: 75532 - RNA, 30 nt, synthetic construct
  misc_feature 1..30: note = Nucleolar and coiled-body phosphoprotein 1 (638-647)
  source 1..30: mol_type = other RNA
agagtggccgacaacagcttcgatgctaag

SEQ ID NO: 75533 - RNA, 27 nt, synthetic construct
  misc_feature 1..27: note = Arginine vasopressin-induced protein 1 (66-74)
  source 1..27: mol_type = other RNA
agagtggccgaggctctgaagaggctc

SEQ ID NO: 75534 - RNA, 27 nt, synthetic construct
  misc_feature 1..27: note = Chondroitin sulfate synthase 3 (30-38)
  source 1..27: mol_type = other RNA
agagtggccgagctgagcgaaaggaag

SEQ ID NO: 75535 - RNA, 27 nt, synthetic construct
  misc_feature 1..27: note = Caspase-9 (236-244)
  source 1..27: mol_type = other RNA
agagtggccaacgctgtcagcgttaag

SEQ ID NO: 75536 - RNA, 39 nt, synthetic construct
  misc_feature 1..39: note = Caspase-9 (236-248)
  source 1..39: mol_type = other RNA
agagtggccaacgctgtcagcgttaagggcatctacaaa

SEQ ID NO: 75537 - RNA, 33 nt, synthetic construct
  misc_feature 1..33: note = 7-dehydrocholesterol reductase (339-349)
  source 1..33: mol_type = other RNA
agagtggccaaccaccagaaggacctgttcagg

SEQ ID NO: 75538 - RNA, 33 nt, synthetic construct
  misc_feature 1..33: note = SHC-transforming protein 3 (55-65)
  source 1..33: mol_type = other RNA
agagtgtgcgaggccgtccccggcgctaagggg

SEQ ID NO: 75539 - RNA, 30 nt, synthetic construct
  misc_feature 1..30: note = Transmembrane protein 98 (138-147)
  source 1..30: mol_type = other RNA
agagtggacgatgtcgttaagagcatgtac

SEQ ID NO: 75540 - RNA, 30 nt, synthetic construct
  misc_feature 1..30: note = Protein OS-9 (16-25)
  source 1..30: mol_type = other RNA
agagtggacgagcccctgagctgctcctac

SEQ ID NO: 75541 - RNA, 27 nt, synthetic construct
  misc_feature 1..27: note = Eukaryotic peptide chain release factor subunit 1 (402-410)
  source 1..27: mol_type = other RNA
agagtggacttccagggcatggagtac

SEQ ID NO: 75542 - RNA, 33 nt, synthetic construct
  misc_feature 1..33: note = Nuclear fragile X mental retardation-interacting protein 2 (272-282)
  source 1..33: mol_type = other RNA
agagtggacggcagcaagcccatctggaaatac

SEQ ID NO: 75543 - RNA, 30 nt, synthetic construct
  misc_feature 1..30: note = COP9 signalosome complex subunit 1 (484-493)
  source 1..30: mol_type = other RNA
agagtggacagccactccaagatcctgtac

SEQ ID NO: 75544 - RNA, 30 nt, synthetic construct
  misc_feature 1..30: note = Brefeldin A-inhibited guanine nucleotide-exchange protein 1 (1662-1671)
  source 1..30: mol_type = other RNA
agagtggacacccaggatcaaggcatgtac

SEQ ID NO: 75545 - RNA, 27 nt, synthetic construct
  misc_feature 1..27: note = Coiled-coil domain-containing protein 127 (252-260)
  source 1..27: mol_type = other RNA
agagtggaggaagccatcctggagaag

SEQ ID NO: 75546 - RNA, 33 nt, synthetic construct
  misc_feature 1..33: note = Copine-1 (267-277)
  source 1..33: mol_type = other RNA
agagtggagaccgaatacagcttcctggactat

SEQ ID NO: 75547 - RNA, 30 nt, synthetic construct
  misc_feature 1..30: note = Tumor protein D53 (48-57)
  source 1..30: mol_type = other RNA
agagtggagaccacagtcactagcctgaag

SEQ ID NO: 75548 - RNA, 30 nt, synthetic construct
  misc_feature 1..30: note = Chromobox protein homolog 6 (9-18)
  source 1..30: mol_type = other RNA
agagtgttcgccgctgagagcatcattaag

SEQ ID NO: 75549 - RNA, 27 nt, synthetic construct
  misc_feature 1..27: note = Eukaryotic initiation factor 4A-III (166-174)
  source 1..27: mol_type = other RNA
agagtgttcgacatgatcaggcggcgc

SEQ ID NO: 75550 - RNA, 30 nt, synthetic construct
  misc_feature 1..30: note = DNA topoisomerase 3-beta-1 (263-272)
  source 1..30: mol_type = other RNA
agagtgttcgacagggagatcgcccagatg

SEQ ID NO: 75551 - RNA, 27 nt, synthetic construct
  misc_feature 1..27: note = Annexin A1 (235-243)
  source 1..27: mol_type = other RNA
agagtgttccagaagtacaccaaatat

SEQ ID NO: 75552 - RNA, 30 nt, synthetic construct
  misc_feature 1..30: note = Hermansky-Pudlak syndrome 5 protein (137-146)
  source 1..30: mol_type = other RNA
agagtgttcgtcggcgaccacgccgggaag

SEQ ID NO: 75553 - RNA, 36 nt, synthetic construct
  misc_feature 1..36: note = Non-specific lipid-transfer protein (13-24)
  source 1..36: mol_type = other RNA
agagtgttcgtcgttggcgtggggatgaccaagttt

SEQ ID NO: 75554 - RNA, 27 nt, synthetic construct
  misc_feature 1..27: note = Receptor activity-modifying protein 2 (18-26)
  source 1..27: mol_type = other RNA
agagtgggcaggcccgccgctctgcgg

SEQ ID NO: 75555 - RNA, 36 nt, synthetic construct
  misc_feature 1..36: note = ATP-dependent RNA helicase DDX3X (407-418)
  source 1..36: mol_type = other RNA
agagtgggcagcacctccgagaacatcacacagaag

SEQ ID NO: 75556 - RNA, 27 nt, synthetic construct
  misc_feature 1..27: note = Dol-P-Man:Man(5)GlcNAc(2)-PP-Dol alpha-1,3-mannosyltransferase (115-123)
  source 1..27: mol_type = other RNA
agagtgcacagcatcttcgtcctgagg

SEQ ID NO: 75557 - RNA, 30 nt, synthetic construct
  misc_feature 1..30: note = Lon protease homolog 2, peroxisomal (197-206)
  source 1..30: mol_type = other RNA
agagtgatcgccattaggcccatacggcgc

SEQ ID NO: 75558 - RNA, 27 nt, synthetic construct
  misc_feature 1..27: note = B-cell lymphoma 3 protein (267-275)
  source 1..27: mol_type = other RNA
agagtgatcgacattctgaggggcaag

SEQ ID NO: 75559 - RNA, 36 nt, synthetic construct
  misc_feature 1..36: note = Serine/threonine-protein kinase TBK1 (143-154)
  source 1..36: mol_type = other RNA
agagtgatcggcgaggacgggcagagcgtctacaag

SEQ ID NO: 75560 - RNA, 39 nt, synthetic construct
  misc_feature 1..39: note = Stress-70 protein, mitochondrial (218-230)
  source 1..39: mol_type = other RNA
agagtgatcaacgagcccaccgccgctgcactggcctac

SEQ ID NO: 75561 - RNA, 33 nt, synthetic construct
  misc_feature 1..33: note = Synembryn-A (493-503)
  source 1..33: mol_type = other RNA
agagtgatccagcccatgggcatgagccctagg

SEQ ID NO: 75562 - RNA, 33 nt, synthetic construct
  misc_feature 1..33: note = GDP-fucose protein O-fucosyltransferase 1 (101-111)
  source 1..33: mol_type = other RNA
agagtgatcagcctggaggacttcatggaaaag

SEQ ID NO: 75563 - RNA, 36 nt, synthetic construct
  misc_feature 1..36: note = Creatine kinase M-type (236-247)
  source 1..36: mol_type = other RNA
agagtgatcagcatggagaagggcgggaacatgaaa

SEQ ID NO: 75564 - RNA, 36 nt, synthetic construct
  misc_feature 1..36: note = COX assembly mitochondrial protein 2 homolog (63-74)
  source 1..36: mol_type = other RNA
agagtgatcgtcacccacggcagcctgaagctcaaa

SEQ ID NO: 75565 - RNA, 27 nt, synthetic construct
  misc_feature 1..27: note = ENTH domain-containing protein 1 (376-384)
  source 1..27: mol_type = other RNA
agagtgaaggagatcgtcattaacaaa

SEQ ID NO: 75566 - RNA, 36 nt, synthetic construct
  misc_feature 1..36: note = Epidermal growth factor receptor substrate 15 (33-44)
  source 1..36: mol_type = other RNA
agagtgctggccagcgacgctgcagccttcctcaag

SEQ ID NO: 75567 - RNA, 30 nt, synthetic construct
  misc_feature 1..30: note = Transient receptor potential cation channel subfamily M member 1 (871-880)
  source 1..30: mol_type = other RNA
agagtgctggacatcttcggcgtcaacaag

SEQ ID NO: 75568 - RNA, 33 nt, synthetic construct
  misc_feature 1..33: note = Anaphase-promoting complex subunit 2 (163-173)
  source 1..33: mol_type = other RNA
agagtgctggaccccagcatggtcatcctcgag

SEQ ID NO: 75569 - RNA, 36 nt, synthetic construct
  misc_feature 1..36: note = Monofunctional C1-tetrahydrofolate synthase, mitochondrial (497-508)
  source 1..36: mol_type = other RNA
agagtgctggacaccaacgataggttcctccggaag

SEQ ID NO: 75570 - RNA, 30 nt, synthetic construct
  misc_feature 1..30: note = Uncharacterized protein C19orf52 (162-171)
  source 1..30: mol_type = other RNA
agagtgctggacgtcggcttcgttgggagg

SEQ ID NO: 75571 - RNA, 27 nt, synthetic construct
  misc_feature 1..27: note = Paired amphipathic helix protein Sin3b (506-514)
  source 1..27: mol_type = other RNA
agagtgctggagagcgtccagaagaaa

SEQ ID NO: 75572 - RNA, 33 nt, synthetic construct
  misc_feature 1..33: note = Nipped-B-like protein (1779-1789)
  source 1..33: mol_type = other RNA
agagtgctgggcgagaacgccatcgctgtcagg

SEQ ID NO: 75573 - RNA, 27 nt, synthetic construct
  misc_feature 1..27: note = Interferon-stimulated gene 20 kDa protein (131-139)
  source 1..27: mol_type = other RNA
agagtgctgagcgagaggctccttcac

SEQ ID NO: 75574 - RNA, 30 nt, synthetic construct
  misc_feature 1..30: note = Interferon-stimulated gene 20 kDa protein (131-140)
  source 1..30: mol_type = other RNA
agagtgctgagcgagaggctccttcacaag

SEQ ID NO: 75575 - RNA, 27 nt, synthetic construct
  misc_feature 1..27: note = 14-3-3 protein sigma (60-68)
  source 1..27: mol_type = other RNA
agagtgctgagctccatcgagcagaag

SEQ ID NO: 75576 - RNA, 33 nt, synthetic construct
  misc_feature 1..33: note = Guanine nucleotide-binding protein G(s) subunit alpha isoforms short (187-197)
  source 1..33: mol_type = other RNA
agagtgctgaccagcggcatcttcgagacaaag

SEQ ID NO: 75577 - RNA, 27 nt, synthetic construct
  misc_feature 1..27: note = T lymphocyte c-maf long form (21-29)
  source 1..27: mol_type = other RNA
agagtgctgaccagcgtcttcacaaag

SEQ ID NO: 75578 - RNA, 27 nt, synthetic construct
  misc_feature 1..27: note = Beta-parvin (351-359)
  source 1..27: mol_type = other RNA
agagtgctgtacaacctcttcaccaag

SEQ ID NO: 75579 - RNA, 33 nt, synthetic construct
  misc_feature 1..33: note = B-cell CLL/lymphoma 7 protein family member A (20-30)
  source 1..33: mol_type = other RNA
agagtgatggccgctatcgagaaggtcaggaaa

SEQ ID NO: 75580 - RNA, 33 nt, synthetic construct
  misc_feature 1..33: note = Nuclear transcription factor Y subunit gamma (25-35)
  source 1..33: mol_type = other RNA
agagtgatggaggaaatcaggaacctgaccgtc

SEQ ID NO: 75581 - RNA, 33 nt, synthetic construct
  misc_feature 1..33: note = Poly (ADP-ribose) polymerase 4 (419-429)
  source 1..33: mol_type = other RNA
agagtgaacgagaccacagaattcctgagcaag

SEQ ID NO: 75582 - RNA, 30 nt, synthetic construct
  misc_feature 1..30: note = Ceramide synthase 5 (379-388)
  source 1..30: mol_type = other RNA
agagtgaacggccacatggggggaagctac

SEQ ID NO: 75583 - RNA, 27 nt, synthetic construct
  misc_feature 1..27: note = Cytoplasmic dynein 1 heavy chain 1 (759-767)
  source 1..27: mol_type = other RNA
agagtgcccctggccatcgtcaacaag

SEQ ID NO: 75584 - RNA, 30 nt, synthetic construct
  misc_feature 1..30: note = Protein scribble homolog (161-170)
  source 1..30: mol_type = other RNA
agagtgccccaggccgagggccctccaaag

SEQ ID NO: 75585 - RNA, 33 nt, synthetic construct
  misc_feature 1..33: note = Phosphatidylinositol 3-kinase regulatory subunit gamma (209-219)
  source 1..33: mol_type = other RNA
agagtgcaggccgaggacctgctctacggcaag

SEQ ID NO: 75586 - RNA, 30 nt, synthetic construct
  misc_feature 1..30: note = Large neutral amino acids transporter small subunit 1 (195-204)
  source 1..30: mol_type = other RNA
agagtgcaggacgccttcgctgcagccaag

SEQ ID NO: 75587 - RNA, 36 nt, synthetic construct
  misc_feature 1..36: note = ATPase family AAA domain-containing protein 3A (605-616)
  source 1..36: mol_type = other RNA
agagtgcaggacgccgtccaacagcaccagcagaag

SEQ ID NO: 75588 - RNA, 33 nt, synthetic construct
  misc_feature 1..33: note = Fibronectin type III domain-containing protein 3B (271-281)
  source 1..33: mol_type = other RNA
agagtgcaggacatcctgagcggcattgagaag

SEQ ID NO: 75589 - RNA, 27 nt, synthetic construct
  misc_feature 1..27: note = 6-phosphofructo-2-kinase/fructose-2,6-bisphosphatase 2 (228-236)
  source 1..27: mol_type = other RNA
agagtgcaggactacatccaaagcaag

SEQ ID NO: 75590 - RNA, 33 nt, synthetic construct
  misc_feature 1..33: note = Probable ATP-dependent RNA helicase DHX37 (767-777)
  source 1..33: mol_type = other RNA
agagtgcagagcgaggaaatgctggaggacaag

SEQ ID NO: 75591 - RNA, 30 nt, synthetic construct
  misc_feature 1..30: note = Charged multivesicular body protein 1b (75-84)
  source 1..30: mol_type = other RNA
agagtgcagaccgccgtcacaatgggcaag

SEQ ID NO: 75592 - RNA, 42 nt, synthetic construct
  misc_feature 1..42: note = 28S ribosomal protein S29, mitochondrial (232-245)
  source 1..42: mol_type = other RNA
agagtgaggaacgccaccgacgctgtcggcatcgttctgaag

SEQ ID NO: 75593 - RNA, 27 nt, synthetic construct
  misc_feature 1..27: note = F-box only protein 21 (77-85)
  source 1..27: mol_type = other RNA
agagtgaggtggcccagcctgatgaag

SEQ ID NO: 75594 - RNA, 30 nt, synthetic construct
  misc_feature 1..30: note = Platelet-activating factor acetylhydrolase 2, cytoplasmic (188-197)
  source 1..30: mol_type = other RNA
agagtgagcgagtgcctgagggtcctcaag

SEQ ID NO: 75595 - RNA, 27 nt, synthetic construct
  misc_feature 1..27: note = ADP-ribosylation factor GTPase-activating protein 1 (148-156)
  source 1..27: mol_type = other RNA
agagtgagcggccagccccaatccgtc

SEQ ID NO: 75596 - RNA, 27 nt, synthetic construct
  misc_feature 1..27: note = DNA polymerase delta catalytic subunit (537-545)
  source 1..27: mol_type = other RNA
agagtgaccggcgtccccctgagctac

SEQ ID NO: 75597 - RNA, 30 nt, synthetic construct
  misc_feature 1..30: note = E3 ubiquitin-protein ligase MIB2 (258-267)
  source 1..30: mol_type = other RNA
agagtggtcgacatcaggggctgggatgtt

SEQ ID NO: 75598 - RNA, 27 nt, synthetic construct
  misc_feature 1..27: note = NADH dehydrogenase (ubiquinone) 1 alpha subcomplex subunit 6 (77-85)
  source 1..27: mol_type = other RNA
agagtggtcgacctgctcgttatcaag

SEQ ID NO: 75599 - RNA, 33 nt, synthetic construct
  misc_feature 1..33: note = Lysine-specific histone demethylase 1B (420-430)
  source 1..33: mol_type = other RNA
agagtgtgggacgataagagcttcaaaggcgtc

SEQ ID NO: 75600 - RNA, 33 nt, synthetic construct
  misc_feature 1..33: note = Coatomer subunit alpha (160-170)
  source 1..33: mol_type = other RNA
agagtgtgggacatcagcggcctgaggaagaaa

SEQ ID NO: 75601 - RNA, 39 nt, synthetic construct
  misc_feature 1..39: note = ATP-binding cassette sub-family B member 8, mitochondrial (669-681)
  source 1..39: mol_type = other RNA
agagtgtgggaggccggcacccacgaagagctgctcaag

SEQ ID NO: 75602 - RNA, 30 nt, synthetic construct
  misc_feature 1..30: note = Methyltransferase-like protein 8 (334-343)
  source 1..30: mol_type = other RNA
agagtgtggatccagggcaagttccaaaaa

SEQ ID NO: 75603 - RNA, 30 nt, synthetic construct
  misc_feature 1..30: note = Charged multivesicular body protein 1a (46-55)
  source 1..30: mol_type = other RNA
agagtgtacgccgagaacgctatcaggaag

SEQ ID NO: 75604 - RNA, 27 nt, synthetic construct
  misc_feature 1..27: note = Neuferricin (62-70)
  source 1..27: mol_type = other RNA
agagtgtacgacgtcagctccggcagg

SEQ ID NO: 75605 - RNA, 27 nt, synthetic construct
  misc_feature 1..27: note = Formin-binding protein 1-like (96-104)
  source 1..27: mol_type = other RNA
agagtgtacggcgagctgatgaggtat

SEQ ID NO: 75606 - RNA, 30 nt, synthetic construct
  misc_feature 1..30: note = Actin filament-associated protein 1-like 2 (535-544)
  source 1..30: mol_type = other RNA
agagtgtacctggacctcacccccgtcaag

SEQ ID NO: 75607 - RNA, 33 nt, synthetic construct
  misc_feature 1..33: note = Transcription termination factor 2 (414-424)
  source 1..33: mol_type = other RNA
agagtgtacctgaccacacagctcaagcaaaaa

SEQ ID NO: 75608 - RNA, 27 nt, synthetic construct
  misc_feature 1..27: note = Follistatin-related protein 5 (344-352)
  source 1..27: mol_type = other RNA
agagtgtaccccgagagccaggccagg

SEQ ID NO: 75609 - RNA, 33 nt, synthetic construct
  misc_feature 1..33: note = Serine/threonine-protein kinase pim-1 (296-306)
  source 1..33: mol_type = other RNA
agagtgtacagcccccctgagtggatcaggtat

SEQ ID NO: 75610 - RNA, 30 nt, synthetic construct
  misc_feature 1..30: note = Epidermal growth factor receptor kinase substrate 8 (772-781)
  source 1..30: mol_type = other RNA
agagtgtacagccagatcaccgtccaaaag

SEQ ID NO: 75611 - RNA, 33 nt, synthetic construct
  misc_feature 1..33: note = Bifunctional 3'-phosphoadenosine 5'-phosphosulfate synthase 1 (386-396)
  source 1..33: mol_type = other RNA
agagtgtactggaacgacggcctggatcagtat

SEQ ID NO: 75612 - RNA, 27 nt, synthetic construct
  misc_feature 1..27: note = ATP-binding cassette sub-family B member 6, mitochondrial (144-152)
  source 1..27: mol_type = other RNA
agatacagggaggccatcattaagtat

SEQ ID NO: 75613 - RNA, 27 nt, synthetic construct
  misc_feature 1..27: note = Melanoma inhibitory activity protein 3 (1397-1405)
  source 1..27: mol_type = other RNA
agcgccgctgaggaagtgaagacctac

SEQ ID NO: 75614 - RNA, 27 nt, synthetic construct
  misc_feature 1..27: note = Transketolase (43-51)
  source 1..27: mol_type = other RNA
agcgccgctgagatcatggcagtgctg

SEQ ID NO: 75615 - RNA, 27 nt, synthetic construct
  misc_feature 1..27: note = Kinesin-like protein KIFC3 (471-479)
  source 1..27: mol_type = other RNA
agcgccgctgagatctacaacgaagtg

SEQ ID NO: 75616 - RNA, 27 nt, synthetic construct
  misc_feature 1..27: note = Protein fem-1 homolog C (91-99)
  source 1..27: mol_type = other RNA
agcgccgctggccacctgaaggtggtc

SEQ ID NO: 75617 - RNA, 27 nt, synthetic construct
  misc_feature 1..27: note = E3 ubiquitin-protein ligase AMFR (606-614)
  source 1..27: mol_type = other RNA
agcgccgacgagagacagaggatgctg

SEQ ID NO: 75618 - RNA, 33 nt, synthetic construct
  misc_feature 1..33: note = Laminin subunit beta-3 (706-716)
  source 1..33: mol_type = other RNA
agcgccgacccctccggcgctttcagaatgctg

SEQ ID NO: 75619 - RNA, 27 nt, synthetic construct
  misc_feature 1..27: note = GRIP and coiled-coil domain-containing protein 2 (1284-1292)
  source 1..27: mol_type = other RNA
agcgccgagcagcaccaaagaaccctg

SEQ ID NO: 75620 - RNA, 27 nt, synthetic construct
  misc_feature 1..27: note = Mortality factor 4-like protein 2 (280-288)
  source 1..27: mol_type = other RNA
agcgccgagtaccacagaaaggctctg

SEQ ID NO: 75621 - RNA, 33 nt, synthetic construct
  misc_feature 1..33: note = Coiled-coil domain-containing protein 77 (190-200)
  source 1..33: mol_type = other RNA
agcgccttcaaggctgaccccaaaatctccaag

SEQ ID NO: 75622 - RNA, 33 nt, synthetic construct
  misc_feature 1..33: note = Versican core protein (1221-1231)
  source 1..33: mol_type = other RNA
agcgccttcaagccctcctctgctatcaccaaa

SEQ ID NO: 75623 - RNA, 30 nt, synthetic construct
  misc_feature 1..30: note = Zinc finger protein 703 (400-409)
  source 1..30: mol_type = other RNA
agcgcccacgaccccgctggcccttccctg

SEQ ID NO: 75624 - RNA, 27 nt, synthetic construct
  misc_feature 1..27: note = Transcription factor 20 (608-616)
  source 1..27: mol_type = other RNA
agcgcccacgagcccggcgggtccctg

SEQ ID NO: 75625 - RNA, 36 nt, synthetic construct
  misc_feature 1..36: note = Probable cation-transporting ATPase 13A3 (802-813)
  source 1..36: mol_type = other RNA
agcgccatcgaccccgaggctattcctgtgaagctg

SEQ ID NO: 75626 - RNA, 27 nt, synthetic construct
  misc_feature 1..27: note = Protein AATF (141-149)
  source 1..27: mol_type = other RNA
agcgccaagacccccggcttctccgtg

SEQ ID NO: 75627 - RNA, 30 nt, synthetic construct
  misc_feature 1..30: note = Ras-specific guanine nucleotide-releasing factor 1 (254-263)
  source 1..30: mol_type = other RNA
agcgccctggagatcgctgaacagctcacc

SEQ ID NO: 75628 - RNA, 36 nt, synthetic construct
  misc_feature 1..36: note = Fc receptor-like A (117-128)
  source 1..36: mol_type = other RNA
agcgccctgggcccccctgggccaaacagagagttc

SEQ ID NO: 75629 - RNA, 33 nt, synthetic construct
  misc_feature 1..33: note = Vimentin (42-52)
  source 1..33: mol_type = other RNA
agcgccctgagaccctccacctctaggtcactc

SEQ ID NO: 75630 - RNA, 39 nt, synthetic construct
  misc_feature 1..39: note = Vimentin (42-54)
  source 1..39: mol_type = other RNA
agcgccctgagaccctccacctctaggtcactctacgct

SEQ ID NO: 75631 - RNA, 33 nt, synthetic construct
  misc_feature 1..33: note = Actin-related protein 2/3 complex subunit 1A (298-308)
  source 1..33: mol_type = other RNA
agcgccatggagagattcaggaacatggacaag

SEQ ID NO: 75632 - RNA, 27 nt, synthetic construct
  misc_feature 1..27: note = Fatty acid synthase (2039-2047)
  source 1..27: mol_type = other RNA
agcgccatggagagaatctgcgaaaag

SEQ ID NO: 75633 - RNA, 30 nt, synthetic construct
  misc_feature 1..30: note = Cytoplasmic dynein 1 heavy chain 1 (1505-1514)
  source 1..30: mol_type = other RNA
agcgccatgaagctgtccccctactataaa

SEQ ID NO: 75634 - RNA, 30 nt, synthetic construct
  misc_feature 1..30: note = Syntenin-1 (23-32)
  source 1..30: mol_type = other RNA
agcgccaaccccgctaatcctgcaatcctg

SEQ ID NO: 75635 - RNA, 30 nt, synthetic construct
  misc_feature 1..30: note = Vacuole membrane protein 1 isoform 8 (83-92)
  source 1..30: mol_type = other RNA
agcgcccaggacttcgcttccagagcaaag

SEQ ID NO: 75636 - RNA, 30 nt, synthetic construct
  misc_feature 1..30: note = HLA class I histocompatibility antigen, alpha chain E (339-348)
  source 1..30: mol_type = other RNA
agcgcccagggctccgagtctcactcactg

SEQ ID NO: 75637 - RNA, 27 nt, synthetic construct
  misc_feature 1..27: note = ATP-dependent RNA helicase DDX54 (145-153)
  source 1..27: mol_type = other RNA
agcgcccagaccggcgctagagcactg

SEQ ID NO: 75638 - RNA, 27 nt, synthetic construct
  misc_feature 1..27: note = Poly(rC)-binding protein 2 (254-262)
  source 1..27: mol_type = other RNA
agcgcccagaccacatcccacgagctg

SEQ ID NO: 75639 - RNA, 27 nt, synthetic construct
  misc_feature 1..27: note = ADP-dependent glucokinase (213-221)
  source 1..27: mol_type = other RNA
agcgcctccggcccccactcttcactg

SEQ ID NO: 75640 - RNA, 30 nt, synthetic construct
  misc_feature 1..30: note = Nodal modulator 3 (166-175)
  source 1..30: mol_type = other RNA
agcgccgtggagttcagacagaccggctac

SEQ ID NO: 75641 - RNA, 30 nt, synthetic construct
  misc_feature 1..30: note = Histone acetyltransferase type B catalytic subunit (16-25)
  source 1..30: mol_type = other RNA
agcgccgtggagaagaaactggctgaatac

SEQ ID NO: 75642 - RNA, 27 nt, synthetic construct
  misc_feature 1..27: note = ADP-ribosylation factor-binding protein GGA1 (288-296)
  source 1..27: mol_type = other RNA
agcgccgtgcccaaggtcatgaaagtt

SEQ ID NO: 75643 - RNA, 27 nt, synthetic construct
  misc_feature 1..27: note = Ankyrin repeat domain-containing protein 20B (272-280)
  source 1..27: mol_type = other RNA
agcgccgtgtccatcttccacgagctg

SEQ ID NO: 75644 - RNA, 27 nt, synthetic construct
  misc_feature 1..27: note = Long-chain-fatty-acid-CoA ligase 3 (66-74)
  source 1..27: mol_type = other RNA
agcgcctacagatccgtgaactctctg

SEQ ID NO: 75645 - RNA, 33 nt, synthetic construct
  misc_feature 1..33: note = Ribulose-phosphate 3-epimerase (186-196)
  source 1..33: mol_type = other RNA
agcgaggaccccagatccgtgatcaacctgctc

SEQ ID NO: 75646 - RNA, 30 nt, synthetic construct
  misc_feature 1..30: note = WD repeat and FYVE domain-containing protein 1 (43-52)
  source 1..30: mol_type = other RNA
agcgaggacagaaccatcagggtgtggctg

SEQ ID NO: 75647 - RNA, 30 nt, synthetic construct
  misc_feature 1..30: note = Clathrin heavy chain 1 (825-834)
  source 1..30: mol_type = other RNA
agcgaggacgtgatcaagaacctgattctc

SEQ ID NO: 75648 - RNA, 30 nt, synthetic construct
  misc_feature 1..30: note = Microtubule-associated protein 4 (230-239)
  source 1..30: mol_type = other RNA
agcgaggaaagaccccctgcccaggctctg

SEQ ID NO: 75649 - RNA, 30 nt, synthetic construct
  misc_feature 1..30: note = Cortactin-binding protein 2 (232-241)
  source 1..30: mol_type = other RNA
agcgagttcgacaccgaaagagagcagctg

SEQ ID NO: 75650 - RNA, 27 nt, synthetic construct
  misc_feature 1..27: note = Ubiquitin carboxyl-terminal hydrolase 48 (254-262)
  source 1..27: mol_type = other RNA
agcgagttcctgaaggaagagaaactc

SEQ ID NO: 75651 - RNA, 39 nt, synthetic construct
  misc_feature 1..39: note = 55 kDa erythrocyte membrane protein (6-18)
  source 1..39: mol_type = other RNA
agcgagggcgaatccgggggatctatgcacaccgccctg

SEQ ID NO: 75652 - RNA, 27 nt, synthetic construct
  misc_feature 1..27: note = Copper transport protein ATOX1 (44-52)
  source 1..27: mol_type = other RNA
agcgagcactccatggacaccctgctc

SEQ ID NO: 75653 - RNA, 39 nt, synthetic construct
  misc_feature 1..39: note = Ventricular zone-expressed PH domain-containing protein homolog 1 (106-118)
  source 1..39: mol_type = other RNA
agcgagatcgaccccctgggccaggggaacgataagctc

SEQ ID NO: 75654 - RNA, 27 nt, synthetic construct
  misc_feature 1..27: note = Prolyl 3-hydroxylase OGFOD1 (290-298)
  source 1..27: mol_type = other RNA
agcgagatcctgctcaaggaattcctt

SEQ ID NO: 75655 - RNA, 27 nt, synthetic construct
  misc_feature 1..27: note = Nucleolar protein 10 (225-233)
  source 1..27: mol_type = other RNA
agcgagatcaactccctgcccaccatt

SEQ ID NO: 75656 - RNA, 33 nt, synthetic construct; identical to SEQ ID NO: 51429
  misc_feature 1..33: note = Leucine-rich repeat LGI family member 3 (77-87)
  source 1..33: mol_type = other RNA

SEQ ID NO: 75657 - RNA, 27 nt, synthetic construct
  misc_feature 1..27: note = Serine-protein kinase ATM (707-715)
  source 1..27: mol_type = other RNA
agcgagatcaccaactccgaaacactg

SEQ ID NO: 75658 - RNA, 30 nt, synthetic construct
  misc_feature 1..30: note = Nuclear pore complex protein Nup50 (255-264)
  source 1..30: mol_type = other RNA
agcgagaagaaaaccgacccctcctctctg

SEQ ID NO: 75659 - RNA, 24 nt, synthetic construct
  misc_feature 1..24: note = Talin-1 (1958-1965)
  source 1..24: mol_type = other RNA
agcgagaaggtgtcccacgtcctg

SEQ ID NO: 75660 - RNA, 30 nt, synthetic construct
  misc_feature 1..30: note = Protein strawberry notch homolog 1 (911-920)
  source 1..30: mol_type = other RNA
agcgagctggacgtgcccgtcgaaatcctc

SEQ ID NO: 75661 - RNA, 33 nt, synthetic construct
  misc_feature 1..33: note = Protein S100-B (31-41)
  source 1..33: mol_type = other RNA
agcgagctgaaggaactcatcaacaatgagctt

SEQ ID NO: 75662 - RNA, 33 nt, synthetic construct
  misc_feature 1..33: note = U2 snRNP-associated SURP motif-containing protein (401-411)
  source 1..33: mol_type = other RNA
agcgagatgtccgaagagaagagagccaaactg

SEQ ID NO: 75663 - RNA, 27 nt, synthetic construct
  misc_feature 1..27: note = Protein piccolo (3378-3386)
  source 1..27: mol_type = other RNA
agcgagaactcccagcacctggaactc

SEQ ID NO: 75664 - RNA, 30 nt, synthetic construct; identical to SEQ ID NO: 51437
  misc_feature 1..30: note = Mitotic checkpoint serine/threonine-protein kinase BUB1 (159-168)
  source 1..30: mol_type = other RNA

SEQ ID NO: 75665 - RNA, 33 nt, synthetic construct
  misc_feature 1..33: note = Gap junction beta-1 protein (253-263)
  source 1..33: mol_type = other RNA
agcgagcaggacggctccctgaaggatatcctc

SEQ ID NO: 75666 - RNA, 36 nt, synthetic construct
  misc_feature 1..36: note = Transformation/transcription domain-associated protein (434-445)
  source 1..36: mol_type = other RNA
agcgagcaggaatccggcaacgggagagacgtgctg

SEQ ID NO: 75667 - RNA, 27 nt, synthetic construct
  misc_feature 1..27: note = Multidrug resistance-associated protein 4 (13-21)
  source 1..27: mol_type = other RNA
agcgagacccccacactgcagggcctc

SEQ ID NO: 75668 - RNA, 36 nt, synthetic construct
  misc_feature 1..36: note = Vitamin K epoxide reductase complex subunit 1 (44-55)
  source 1..36: mol_type = other RNA
agcttcagaaaggtgcaggagccccaaggcaaagcc

SEQ ID NO: 75669 - RNA, 27 nt, synthetic construct
  misc_feature 1..27: note = POTE ankyrin domain family member F (855-863)
  source 1..27: mol_type = other RNA
agcggcgacggggtgacccacacagtc

SEQ ID NO: 75670 - RNA, 27 nt, synthetic construct
  misc_feature 1..27: note = Disabled homolog 2 (538-546)
  source 1..27: mol_type = other RNA
agcggcttctcccagcccgtgatcttt

SEQ ID NO: 75671 - RNA, 42 nt, synthetic construct
  misc_feature 1..42: note = Heterogeneous nuclear ribonucleoprotein U-like protein 1 (662-675)
  source 1..42: mol_type = other RNA
agcggcgggggaggttactcccagaacagatggggcaataac

SEQ ID NO: 75672 - RNA, 45 nt, synthetic construct
  misc_feature 1..45: note = Prelamin-A/C (483-497)
  source 1..45: mol_type = other RNA
agcggcgggggatccttcggtgacaacctggtgaccagatcttac

SEQ ID NO: 75673 - RNA, 42 nt, synthetic construct
  misc_feature 1..42: note = Keratin, type II cytoskeletal 1 (604-617)
  source 1..42: mol_type = other RNA
agcggcgggggatcctctggtggctcaatcgggggaagaggc

SEQ ID NO: 75674 - RNA, 39 nt, synthetic construct
  misc_feature 1..39: note = Cold-inducible RNA-binding protein (148-160)
  source 1..39: mol_type = other RNA
agcggcgggtactccgacagatcttcaggaggtagttat

SEQ ID NO: 75675 - RNA, 45 nt, synthetic construct
  misc_feature 1..45: note = Serine/threonine-protein phosphatase PP1-beta catalytic subunit (311-325)
  source 1..45: mol_type = other RNA
agcggcagacccgtgacccctccaaggacagccaacccgcccaag

SEQ ID NO: 75676 - RNA, 30 nt, synthetic construct
  misc_feature 1..30: note = Frataxin, mitochondrial (81-90)
  source 1..30: mol_type = other RNA
agcggcaccctggggcaccccggatccctc

SEQ ID NO: 75677 - RNA, 39 nt, synthetic construct
  misc_feature 1..39: note = Caprin-1 (663-675)
  source 1..39: mol_type = other RNA
agcggctaccagagagacgggtatcaacagaacttcaag

SEQ ID NO: 75678 - RNA, 27 nt, synthetic construct
  misc_feature 1..27: note = Protein kinase C delta-binding protein (70-78)
  source 1..27: mol_type = other RNA
agccacgacaccacatccaacactctg

SEQ ID NO: 75679 - RNA, 30 nt, synthetic construct
  misc_feature 1..30: note = E3 ubiquitin-protein ligase TRIM32 (566-575)
  source 1..30: mol_type = other RNA
agccacttcttttccgagaacgaagacttc

SEQ ID NO: 75680 - RNA, 30 nt, synthetic construct
  misc_feature 1..30: note = ATP-dependent RNA helicase DDX42 (307-316)
  source 1..30: mol_type = other RNA
agccacgtgagacccgacaggcagaccctg

SEQ ID NO: 75681 - RNA, 27 nt, synthetic construct
  misc_feature 1..27: note = Transmembrane protein 147 (87-95)
  source 1..27: mol_type = other RNA
agcatcgactccaacatttctctggtg

SEQ ID NO: 75682 - RNA, 27 nt, synthetic construct
  misc_feature 1..27: note = Neuron navigator 2 (1236-1244)
  source 1..27: mol_type = other RNA
agcatcgactccaacatttcttcaaag

SEQ ID NO: 75683 - RNA, 36 nt, synthetic construct
  misc_feature 1..36: note = Fructose-bisphosphate aldolase A (46-57)
  source 1..36: mol_type = other RNA
agcatcggcaccgagaacacagaagagaatagaagg

SEQ ID NO: 75684 - RNA, 27 nt, synthetic construct
  misc_feature 1..27: note = Septin-9 (321-329)
  source 1..27: mol_type = other RNA
agcatccacttcgaggcctacagagtg

SEQ ID NO: 75685 - RNA, 30 nt, synthetic construct
  misc_feature 1..30: note = Lanosterol 14-alpha demethylase (173-182)
  source 1..30: mol_type = other RNA
agcatcattgagaaggaaaccaaagagtac

SEQ ID NO: 75686 - RNA, 27 nt, synthetic construct
  misc_feature 1..27: note = Heterogeneous nuclear ribonucleoprotein K (401-409)
  source 1..27: mol_type = other RNA
agcatcattggcaaggggggacagaga

SEQ ID NO: 75687 - RNA, 33 nt, synthetic construct
  misc_feature 1..33: note = Interleukin-1 receptor accessory protein (317-327)
  source 1..33: mol_type = other RNA
agcatcaagaaagtgacctccgaggacctgaag

SEQ ID NO: 75688 - RNA, 33 nt, synthetic construct
  misc_feature 1..33: note = Ubiquitin carboxyl-terminal hydrolase 11 (519-529)
  source 1..33: mol_type = other RNA
agcatcctggacagagatgacattttcgtgtac

SEQ ID NO: 75689 - RNA, 33 nt, synthetic construct
  misc_feature 1..33: note = Mortality factor 4-like protein 1 (192-202)
  source 1..33: mol_type = other RNA
agcatcctggaggactacgccaactataagaaa

SEQ ID NO: 75690 - RNA, 39 nt, synthetic construct
  misc_feature 1..39: note = Protein transport protein Sec31A (332-344)
  source 1..39: mol_type = other RNA
agcatcatgggcgggtccaccgacggactgagacagaag

SEQ ID NO: 75691 - RNA, 27 nt, synthetic construct
  misc_feature 1..27: note = Casein kinase I isoform delta (401-409)
  source 1..27: mol_type = other RNA
agcatccccttcgagcaccatggcaag

SEQ ID NO: 75692 - RNA, 30 nt, synthetic construct
  misc_feature 1..30: note = Protein maestro (14-23)
  source 1..30: mol_type = other RNA
agcatccccacctcccagcctaagcaaaaa

SEQ ID NO: 75693 - RNA, 30 nt, synthetic construct
  misc_feature 1..30: note = Inosine-5'-monophosphate dehydrogenase 1 (531-540)
  source 1..30: mol_type = other RNA
agcatccaggacaagggctccattcaaaaa

SEQ ID NO: 75694 - RNA, 30 nt, synthetic construct
  misc_feature 1..30: note = NHP2-like protein 1 (118-127)
  source 1..30: mol_type = other RNA
agcatccagcaatccattgagagactgctc

SEQ ID NO: 75695 - RNA, 39 nt, synthetic construct
  misc_feature 1..39: note = ATP synthase F(0) complex subunit B1, mitochondrial (226-238)
  source 1..39: mol_type = other RNA
agcatctccacccagcaagagaaggaaacaattgccaaa

SEQ ID NO: 75696 - RNA, 36 nt, synthetic construct
  misc_feature 1..36: note = StAR-related lipid transfer protein 13 (339-350)
  source 1..36: mol_type = other RNA
agcatctacgacaacgtgcccggctcccacctgtat

SEQ ID NO: 75697 - RNA, 36 nt, synthetic construct
  misc_feature 1..36: note = Carboxypeptidase Q (211-222)
  source 1..36: mol_type = other RNA
agcatctactccccccacaccggcattcaggagtat

SEQ ID NO: 75698 - RNA, 39 nt, synthetic construct
  misc_feature 1..39: note = Keratin, type I cytoskeletal 10 (148-160)
  source 1..39: mol_type = other RNA
agcaaggagctgaccacagaaatcgacaacaatattgag

SEQ ID NO: 75699 - RNA, 27 nt, synthetic construct
  misc_feature 1..27: note = Receptor-interacting serine/threonine-protein kinase 1 (376-384)
  source 1..27: mol_type = other RNA
agcaagctgcaggacgaggccaactac

SEQ ID NO: 75700 - RNA, 39 nt, synthetic construct
  misc_feature 1..39: note = CDK5 regulatory subunit-associated protein 2 (133-145)
  source 1..39: mol_type = other RNA
agcctggccgaggctggcgggtccgaaatccagagagtg

SEQ ID NO: 75701 - RNA, 27 nt, synthetic construct
  misc_feature 1..27: note = MICAL-like protein 2 (22-30)
  source 1..27: mol_type = other RNA
agcctggccgagttctccctccttaag

SEQ ID NO: 75702 - RNA, 33 nt, synthetic construct
  misc_feature 1..33: note = Wiskott-Aldrich syndrome protein family member 2 (67-77)
  source 1..33: mol_type = other RNA
agcctggccgagagagtggacaggctccaggtc

SEQ ID NO: 75703 - RNA, 24 nt, synthetic construct
  misc_feature 1..24: note = Nucleolar protein 11 (286-293)
  source 1..24: mol_type = other RNA
agcctgtgccccgacctcatggag

SEQ ID NO: 75704 - RNA, 27 nt, synthetic construct
  misc_feature 1..27: note = Insulin-degrading enzyme (224-232)
  source 1..27: mol_type = other RNA
agcctggacgatctcaccaaccttgtg

SEQ ID NO: 75705 - RNA, 27 nt, synthetic construct
  misc_feature 1..27: note = Signal peptidase complex subunit 2 (59-67)
  source 1..27: mol_type = other RNA
agcctggacgattccgccaagaaagtg

SEQ ID NO: 75706 - RNA, 33 nt, synthetic construct
  misc_feature 1..33: note = Signal peptidase complex subunit 2 (59-69)
  source 1..33: mol_type = other RNA
agcctggacgattccgccaagaaagtgctcctt

SEQ ID NO: 75707 - RNA, 27 nt, synthetic construct
  misc_feature 1..27: note = Sodium/potassium-transporting ATPase subunit alpha-1 (47-55)
  source 1..27: mol_type = other RNA
agcctggacgagctccacagaaagtac

SEQ ID NO: 75708 - RNA, 27 nt, synthetic construct
  misc_feature 1..27: note = Transmembrane protein 132B (241-249)
  source 1..27: mol_type = other RNA
agcctggacgagatggtggtctccgtt

SEQ ID NO: 75709 - RNA, 27 nt, synthetic construct
  misc_feature 1..27: note = GREB1-like protein (74-82)
  source 1..27: mol_type = other RNA
agcctggacttctccaacaatctcacc

SEQ ID NO: 75710 - RNA, 27 nt, synthetic construct
  misc_feature 1..27: note = 2'-5'-oligoadenylate synthase 2 (123-131)
  source 1..27: mol_type = other RNA
agcctggacggcttcaccatccaggtg

SEQ ID NO: 75711 - RNA, 27 nt, synthetic construct
  misc_feature 1..27: note = Angio-associated migratory cell protein (93-101)
  source 1..27: mol_type = other RNA
agcctggaccccaagaccaacacactc

SEQ ID NO: 75712 - RNA, 21 nt, synthetic construct
  misc_feature 1..21: note = Eukaryotic translation initiation factor 3 subunit C-like protein (835-841)
  source 1..21: mol_type = other RNA
agcctggaccagcccacccaa

SEQ ID NO: 75713 - RNA, 27 nt, synthetic construct
  misc_feature 1..27: note = Regulator of nonsense transcripts 2 (992-1000)
  source 1..27: mol_type = other RNA
agcctggaggaatccatcagacaggtg

SEQ ID NO: 75714 - RNA, 36 nt, synthetic construct
  misc_feature 1..36: note = Heterogeneous nuclear ribonucleoprotein M (536-547)
  source 1..36: mol_type = other RNA
agcctggagagaatgggcctcgaaaggatgggggcc

SEQ ID NO: 75715 - RNA, 39 nt, synthetic construct
  misc_feature 1..39: note = Heterogeneous nuclear ribonucleoprotein M (536-548)
  source 1..39: mol_type = other RNA
agcctggagagaatgggcctcgaaaggatgggggccaac

SEQ ID NO: 75716 - RNA, 27 nt, synthetic construct
  misc_feature 1..27: note = ATP-sensitive inward rectifier potassium channel 10 (186-194)
  source 1..27: mol_type = other RNA
agcctgttcgaccaggtggtcaaggtt

SEQ ID NO: 75717 - RNA, 36 nt, synthetic construct
  misc_feature 1..36: note = Inositol 1,4,5-trisphosphate receptor type 3 (365-376)
  source 1..36: mol_type = other RNA
agcctgttcgagctcgaccccaccacacttcagaag

SEQ ID NO: 75718 - RNA, 30 nt, synthetic construct
  misc_feature 1..30: note = Utrophin (249-258)
  source 1..30: mol_type = other RNA
agcctgttcgaggtgctcccccagcaagtc

SEQ ID NO: 75719 - RNA, 27 nt, synthetic construct
  misc_feature 1..27: note = Microtubule-associated tumor suppressor 1 (694-702)
  source 1..27: mol_type = other RNA
agcctgttcctcggctccgcctctaag

SEQ ID NO: 75720 - RNA, 27 nt, synthetic construct
  misc_feature 1..27: note = V-type proton ATPase 116 kDa subunit a isoform 1 (555-563)
  source 1..27: mol_type = other RNA
agcctgttcaaccacatctactttaag

SEQ ID NO: 75721 - RNA, 27 nt, synthetic construct
  misc_feature 1..27: note = Ventricular zone-expressed PH domain-containing protein homolog 1 (252-260)
  source 1..27: mol_type = other RNA
agcctgttccccgagcctctctccatc

SEQ ID NO: 75722 - RNA, 30 nt, synthetic construct
  misc_feature 1..30: note = Eukaryotic translation initiation factor 3 subunit E (218-227)
  source 1..30: mol_type = other RNA
agcctgttcgtgtttttcaaccaccccaag

SEQ ID NO: 75723 - RNA, 27 nt, synthetic construct
  misc_feature 1..27: note = Metalloproteinase inhibitor 3 (15-23)
  source 1..27: mol_type = other RNA
agcctgggcgactggggggccgaggct

SEQ ID NO: 75724 - RNA, 27 nt, synthetic construct
  misc_feature 1..27: note = Ran GTPase-activating protein 1 (102-110)
  source 1..27: mol_type = other RNA
agcctgggcgaggggctcatcaccgcc

SEQ ID NO: 75725 - RNA, 30 nt, synthetic construct
  misc_feature 1..30: note = Homeobox protein SEBOX (201-210)
  source 1..30: mol_type = other RNA
agcctgggctccctctctgaccttatctac

SEQ ID NO: 75726 - RNA, 27 nt, synthetic construct
  misc_feature 1..27: note = Nuclear receptor subfamily 4 group A member 1 (492-500)
  source 1..27: mol_type = other RNA
agcctgcactccctccttgtggacgtc

SEQ ID NO: 75727 - RNA, 27 nt, synthetic construct
  misc_feature 1..27: note = Carboxypeptidase M (303-311)
  source 1..27: mol_type = other RNA
agcctgatcgagtacattaagcaggtg

SEQ ID NO: 75728 - RNA, 30 nt, synthetic construct
  misc_feature 1..30: note = Zinc finger FYVE domain-containing protein 16 (160-169)
  source 1..30: mol_type = other RNA
agcctgatcggcctcgacctttcctctgtg

SEQ ID NO: 75729 - RNA, 27 nt, synthetic construct
  misc_feature 1..27: note = Src kinase-associated phosphoprotein 2 (47-55)
  source 1..27: mol_type = other RNA
agcctgatcaagaaaattaaggacgtg

SEQ ID NO: 75730 - RNA, 27 nt, synthetic construct
  misc_feature 1..27: note = Small glutamine-rich tetratricopeptide repeat-containing protein beta (33-41)
  source 1..27: mol_type = other RNA
agcctgatcaacaatcccgccttcatt

SEQ ID NO: 75731 - RNA, 27 nt, synthetic construct
  misc_feature 1..27: note = Anoctamin-4 (154-162)
  source 1..27: mol_type = other RNA
agcctgatcaactccgacattatattc

SEQ ID NO: 75732 - RNA, 30 nt, synthetic construct
  misc_feature 1..30: note = Anoctamin-4 (154-163)
  source 1..30: mol_type = other RNA
agcctgatcaactccgacattatattcgtg

SEQ ID NO: 75733 - RNA, 33 nt, synthetic construct
  misc_feature 1..33: note = Serine/threonine-protein kinase Sgk1 (451-461)
  source 1..33: mol_type = other RNA
agcctgatcaactgggacgatctcattaataag

SEQ ID NO: 75734 - RNA, 33 nt, synthetic construct
  misc_feature 1..33: note = Probable global transcription activator SNF2L1 (137-147)
  source 1..33: mol_type = other RNA
agcctgatctccgccggcgactacagacacagg

SEQ ID NO: 75735 - RNA, 27 nt, synthetic construct
  misc_feature 1..27: note = Lambda-crystallin homolog (73-81)
  source 1..27: mol_type = other RNA
agcctgatctccggctgccccaacatt

SEQ ID NO: 75736 - RNA, 30 nt, synthetic construct
  misc_feature 1..30: note = Alpha-aminoadipic semialdehyde dehydrogenase (196-205)
  source 1..30: mol_type = other RNA
agcctgatctccgtggccgtcaccaagatt

SEQ ID NO: 75737 - RNA, 30 nt, synthetic construct
  misc_feature 1..30: note = Endonuclease G, mitochondrial (288-297)
  source 1..30: mol_type = other RNA
agcctgaaggccatcaccgctggctccaaa

SEQ ID NO: 75738 - RNA, 27 nt, synthetic construct
  misc_feature 1..27: note = Cysteine protease ATG4C (177-185)
  source 1..27: mol_type = other RNA
agcctgaaggagaccatcggcaaatac

SEQ ID NO: 75739 - RNA, 27 nt, synthetic construct
  misc_feature 1..27: note = DNA-directed RNA polymerase II subunit RPB11-a (99-107)
  source 1..27: mol_type = other RNA
agcctgctcgaggaaagattcagggtg

SEQ ID NO: 75740 - RNA, 27 nt, synthetic construct
  misc_feature 1..27: note = Nuclear receptor subfamily 4 group A member 3 (230-238)
  source 1..27: mol_type = other RNA
agcctgctcggcgagtccccctctctt

SEQ ID NO: 75741 - RNA, 27 nt, synthetic construct
  misc_feature 1..27: note = Protein naked cuticle homolog 1 (158-166)
  source 1..27: mol_type = other RNA
agcctgctccacaccatctacgaggtg

SEQ ID NO: 75742 - RNA, 30 nt, synthetic construct; identical to SEQ ID NO: 51515
  misc_feature 1..30: note = IL6ST nirs variant 1 (26-35)
  source 1..30: mol_type = other RNA

SEQ ID NO: 75743 - RNA, 27 nt, synthetic construct
  misc_feature 1..27: note = Protein transport protein Sec23A (156-164)
  source 1..27: mol_type = other RNA
agcctgctcccccctaccgcccttgtg

SEQ ID NO: 75744 - RNA, 30 nt, synthetic construct
  misc_feature 1..30: note = E3 ubiquitin-protein ligase UBR1 (683-692)
  source 1..30: mol_type = other RNA
agcctgatggaccccaacaagttcctcctt

SEQ ID NO: 75745 - RNA, 36 nt, synthetic construct
  misc_feature 1..36: note = Abhydrolase domain-containing protein 2 (299-310)
  source 1..36: mol_type = other RNA
agcctgatgcagatcgacgataacgtgatgagaaag

SEQ ID NO: 75746 - RNA, 27 nt, synthetic construct
  misc_feature 1..27: note = Fatty acid synthase (1570-1578)
  source 1..27: mol_type = other RNA
agcctgaacttcagagacatcatgctc

SEQ ID NO: 75747 - RNA, 27 nt, synthetic construct
  misc_feature 1..27: note = Putative segment polarity protein dishevelled homolog DVL1P1 (246-254)
  source 1..27: mol_type = other RNA
agcctgaacatcattaccgtgacactc

SEQ ID NO: 75748 - RNA, 45 nt, synthetic construct
  misc_feature 1..45: note = Integrin alpha-6 (599-613)
  source 1..45: mol_type = other RNA
agcctgcccgaggtgctccctatccttaactccgacgaaccaaag

SEQ ID NO: 75749 - RNA, 36 nt, synthetic construct
  misc_feature 1..36: note = 60S ribosomal protein L38 (59-70)
  source 1..36: mol_type = other RNA
agcctgccccctggcctcgccgtgaaggagcttaaa

SEQ ID NO: 75750 - RNA, 27 nt, synthetic construct
  misc_feature 1..27: note = Transcription cofactor HES-6 (44-52)
  source 1..27: mol_type = other RNA
agcctgcaggagctcagacttctgttg

SEQ ID NO: 75751 - RNA, 30 nt, synthetic construct
  misc_feature 1..30: note = Anaphase-promoting complex subunit 1 (60-69)
  source 1..30: mol_type = other RNA
agcctgcaggaggtgaccatccacgaaaag

SEQ ID NO: 75752 - RNA, 27 nt, synthetic construct
  misc_feature 1..27: note = Nestin (24-32)
  source 1..27: mol_type = other RNA
agcctgcagaaggagaaccaagaactc

SEQ ID NO: 75753 - RNA, 33 nt, synthetic construct
  misc_feature 1..33: note = Uncharacterized protein C17orf98 (105-115)
  source 1..33: mol_type = other RNA
agcctgcagcaagtgaccggccacgaccattac

SEQ ID NO: 75754 - RNA, 27 nt, synthetic construct
  misc_feature 1..27: note = RING finger protein 10 (254-262)
  source 1..27: mol_type = other RNA
agcctgtccgagaagacctggtctaaa

SEQ ID NO: 75755 - RNA, 27 nt, synthetic construct
  misc_feature 1..27: note = Putative ATP-dependent RNA helicase TDRD12 (1100-1108)
  source 1..27: mol_type = other RNA
agcctgtcccagaccccccctagagtg

SEQ ID NO: 75756 - RNA, 30 nt, synthetic construct
  misc_feature 1..30: note = Alpha-crystallin B chain (129-138)
  source 1..30: mol_type = other RNA
agcctgtcctctgacggcgtgctcaccgtc

SEQ ID NO: 75757 - RNA, 27 nt, synthetic construct
  misc_feature 1..27: note = PWWP domain-containing protein MUM1 (280-288)
  source 1..27: mol_type = other RNA
agcctgaccgccccccctgctccagag

SEQ ID NO: 75758 - RNA, 30 nt, synthetic construct
  misc_feature 1..30: note = Probable ATP-dependent RNA helicase DHX40 (351-360)
  source 1..30: mol_type = other RNA
agcctgaccatcgacggcattagatacgtg

SEQ ID NO: 75759 - RNA, 33 nt, synthetic construct
  misc_feature 1..33: note = Integrator complex subunit 7 (196-206)
  source 1..33: mol_type = other RNA
agcctggtggacacccccaagcagatccaactc

SEQ ID NO: 75760 - RNA, 30 nt, synthetic construct
  misc_feature 1..30: note = Transcobalamin-1 (223-232)
  source 1..30: mol_type = other RNA
agcctggtggagaagatcctctccgaaaaa

SEQ ID NO: 75761 - RNA, 33 nt, synthetic construct
  misc_feature 1..33: note = Vacuolar protein sorting-associated protein 41 homolog (618-628)
  source 1..33: mol_type = other RNA
agcctgtacgccgagtatgacagacccaacctc

SEQ ID NO: 75762 - RNA, 33 nt, synthetic construct
  misc_feature 1..33: note = Spermine synthase (309-319)
  source 1..33: mol_type = other RNA
agcctgtacgaggaacagctcggcagactttat

SEQ ID NO: 75763 - RNA, 33 nt, synthetic construct; identical to SEQ ID NO: 51536
  misc_feature 1..33: note = General transcription factor 3C polypeptide 3 (259-269)
  source 1..33: mol_type = other RNA

SEQ ID NO: 75764 - RNA, 27 nt, synthetic construct
  misc_feature 1..27: note = COP9 signalosome complex subunit 3 (281-289)
  source 1..27: mol_type = other RNA
agcctgtacaagaaaaacatccagaga

SEQ ID NO: 75765 - RNA, 30 nt, synthetic construct
  misc_feature 1..30: note = P2X purinoceptor 7 (286-295)
  source 1..30: mol_type = other RNA
agcctgtaccccggctataacttcagatac

SEQ ID NO: 75766 - RNA, 27 nt, synthetic construct
  misc_feature 1..27: note = Death-inducer obliterator 1 (1135-1143)
  source 1..27: mol_type = other RNA
agcctgtactcctatttctcttcaaga

SEQ ID NO: 75767 - RNA, 30 nt, synthetic construct
  misc_feature 1..30: note = Protein prune homolog 2 (269-278)
  source 1..30: mol_type = other RNA
agcctgtacaccgaggacatgacacagaag

SEQ ID NO: 75768 - RNA, 27 nt, synthetic construct
  misc_feature 1..27: note = Protein argonaute-2 (566-574)
  source 1..27: mol_type = other RNA
agcatggacgcccaccccaacagatac

SEQ ID NO: 75769 - RNA, 27 nt, synthetic construct
  misc_feature 1..27: note = Protein argonaute-1 (615-623)
  source 1..27: mol_type = other RNA
agcatggacgcccacccctccagatac

SEQ ID NO: 75770 - RNA, 27 nt, synthetic construct
  misc_feature 1..27: note = 5,6-dihydroxyindole-2-carboxylic acid oxidase (506-514)
  source 1..27: mol_type = other RNA
agcatggacgaggccaaccagcccctg

SEQ ID NO: 75771 - RNA, 30 nt, synthetic construct
  misc_feature 1..30: note = Kinesin-like protein KIF13A (63-72)
  source 1..30: mol_type = other RNA
agcatggacgagtccaacaccacaaagtac

SEQ ID NO: 75772 - RNA, 27 nt, synthetic construct
  misc_feature 1..27: note = Protein argonaute-4 (609-617)
  source 1..27: mol_type = other RNA
agcatggacggccacccctccagatac

SEQ ID NO: 75773 - RNA, 27 nt, synthetic construct
  misc_feature 1..27: note = Serine-protein kinase ATM (2549-2557)
  source 1..27: mol_type = other RNA
agcatggaccacccccatcacaccctg

SEQ ID NO: 75774 - RNA, 27 nt, synthetic construct
  misc_feature 1..27: note = V-type proton ATPase 116 kDa subunit a isoform 3 (340-348)
  source 1..27: mol_type = other RNA
agcatggaggaaggcgtgtccgccgtc

SEQ ID NO: 75775 - RNA, 36 nt, synthetic construct
  misc_feature 1..36: note = RNA-binding protein EWS (350-361)
  source 1..36: mol_type = other RNA
agcatgttcggctcccccgggggactgagagaggcc

SEQ ID NO: 75776 - RNA, 33 nt, synthetic construct
  misc_feature 1..33: note = Ribosome-binding protein 1 (32-42)
  source 1..33: mol_type = other RNA
agcatgaaggagacctcctacgaagaggccctg

SEQ ID NO: 75777 - RNA, 30 nt, synthetic construct; identical to SEQ ID NO: 51550
  misc_feature 1..30: note = Caprin-1 (376-385)
  source 1..30: mol_type = other RNA

SEQ ID NO: 75778 - RNA, 27 nt, synthetic construct
  misc_feature 1..27: note = Protein GREB1 (500-508)
  source 1..27: mol_type = other RNA
agcatgctgggcgaggaaatccagctc

SEQ ID NO: 75779 - RNA, 27 nt, synthetic construct
  misc_feature 1..27: note = Cystine/glutamate transporter (330-338)
  source 1..27: mol_type = other RNA
agcatgaacggcggggtgttcgccgtc

SEQ ID NO: 75780 - RNA, 30 nt, synthetic construct; identical to SEQ ID NO: 51553
  misc_feature 1..30: note = Myosin-10 (371-380)
  source 1..30: mol_type = other RNA

SEQ ID NO: 75781 - RNA, 27 nt, synthetic construct
  misc_feature 1..27: note = T-complex protein 1 subunit alpha (155-163)
  source 1..27: mol_type = other RNA
agcatgtcctctaagatcattggcata

SEQ ID NO: 75782 - RNA, 30 nt, synthetic construct
  misc_feature 1..30: note = Liprin-alpha-1 (1169-1178)
  source 1..30: mol_type = other RNA
agcatgtcctctccctcaatgcagcctaag

SEQ ID NO: 75783 - RNA, 27 nt, synthetic construct
  misc_feature 1..27: note = Protein PAT1 homolog 1 (499-507)
  source 1..27: mol_type = other RNA
agcatgtacgacaacctgagaggcaag

SEQ ID NO: 75784 - RNA, 45 nt, synthetic construct
  misc_feature 1..45: note = Heterogeneous nuclear ribonucleoprotein A1-like 2 (99-113)
  source 1..45: mol_type = other RNA
agcaacttcggcgggggaggttcctacaatgactttggcaactat

SEQ ID NO: 75785 - RNA, 27 nt, synthetic construct
  misc_feature 1..27: note = Catenin beta-1 (605-613)
  source 1..27: mol_type = other RNA
agccccatcgagaacattcagagagtg

SEQ ID NO: 75786 - RNA, 27 nt, synthetic construct
  misc_feature 1..27: note = Pleckstrin homology-like domain family A member 2 (42-50)
  source 1..27: mol_type = other RNA
agccccagagccaggcctaaggagctg

SEQ ID NO: 75787 - RNA, 30 nt, synthetic construct
  misc_feature 1..30: note = Clathrin heavy chain 1 (1427-1436)
  source 1..30: mol_type = other RNA
agccccagactggaccacaccagggccgtg

SEQ ID NO: 75788 - RNA, 39 nt, synthetic construct
  misc_feature 1..39: note = Arginine/serine-rich protein 1 (18-30)
  source 1..39: mol_type = other RNA
agcccctccacctctagatcaggcgggagtagcaggctg

SEQ ID NO: 75789 - RNA, 27 nt, synthetic construct
  misc_feature 1..27: note = Disabled homolog 2 (471-479)
  source 1..27: mol_type = other RNA
agccccaccggccagcctacagccctg

SEQ ID NO: 75790 - RNA, 45 nt, synthetic construct
  misc_feature 1..45: note = Transgelin-2 (185-199)
  source 1..45: mol_type = other RNA
agccaggccggcatgaccgggtacggaatgcccagacaaatcctg

SEQ ID NO: 75791 - RNA, 27 nt, synthetic construct
  misc_feature 1..27: note = Transmembrane protein 8A (50-58)
  source 1..27: mol_type = other RNA
agccaggccccccaaagactgtccttc

SEQ ID NO: 75792 - RNA, 27 nt, synthetic construct
  misc_feature 1..27: note = Serine/threonine-protein phosphatase 4 regulatory subunit 2 (5-13)
  source 1..27: mol_type = other RNA
agccagttcaagggctactttatcttc

SEQ ID NO: 75793 - RNA, 36 nt, synthetic construct
  misc_feature 1..36: note = Copine-8 (260-271)
  source 1..36: mol_type = other RNA
agccagttcaacgtgtacgaggtcgttaatcccaag

SEQ ID NO: 75794 - RNA, 30 nt, synthetic construct
  misc_feature 1..30: note = Transmembrane protein 131 (402-411)
  source 1..30: mol_type = other RNA
agccagttctccggcaagatcaccgtgaaa

SEQ ID NO: 75795 - RNA, 27 nt, synthetic construct
  misc_feature 1..27: note = Ragulator complex protein LAMTOR1 (73-81)
  source 1..27: mol_type = other RNA
agccagggcatggagcaacacgaatac

SEQ ID NO: 75796 - RNA, 39 nt, synthetic construct
  misc_feature 1..39: note = Catenin alpha-1 (268-280)
  source 1..39: mol_type = other RNA
agccagcaccaaggcgggggaggtggcgagctggcctac

SEQ ID NO: 75797 - RNA, 27 nt, synthetic construct
  misc_feature 1..27: note = Protein NPAT (417-425)
  source 1..27: mol_type = other RNA
agccagatctccacctctattcaaaag

SEQ ID NO: 75798 - RNA, 27 nt, synthetic construct
  misc_feature 1..27: note = A-kinase anchor protein 9 (687-695)
  source 1..27: mol_type = other RNA
agccagaagatcgagaccatgcaattc

SEQ ID NO: 75799 - RNA, 33 nt, synthetic construct
  misc_feature 1..33: note = TSC22 domain family protein 1 (1018-1028)
  source 1..33: mol_type = other RNA
agccagctggagcaagaaaacaatctccttaag

SEQ ID NO: 75800 - RNA, 27 nt, synthetic construct
  misc_feature 1..27: note = Tubulin-specific chaperone E (124-132)
  source 1..27: mol_type = other RNA
agccagctgtccaagctccaagaggtg

SEQ ID NO: 75801 - RNA, 30 nt, synthetic construct
  misc_feature 1..30: note = Phosphatidylinositol-binding clathrin assembly protein (520-529)
  source 1..30: mol_type = other RNA
agccagaaccaaaatctgcccgtggccaag

SEQ ID NO: 75802 - RNA, 30 nt, synthetic construct
  misc_feature 1..30: note = Heat shock protein HSP 90-alpha (575-584)
  source 1..30: mol_type = other RNA
agccagaacagaaagaaactgtccgagctc

SEQ ID NO: 75803 - RNA, 27 nt, synthetic construct
  misc_feature 1..27: note = Clathrin interactor 1 (459-467)
  source 1..27: mol_type = other RNA
agccagaacaccgacatggtgcaaaag

SEQ ID NO: 75804 - RNA, 27 nt, synthetic construct
  misc_feature 1..27: note = Rotatin (918-926)
  source 1..27: mol_type = other RNA
agccagcaatcctctctgctcaccgtg

SEQ ID NO: 75805 - RNA, 45 nt, synthetic construct
  misc_feature 1..45: note = Cold-inducible RNA-binding protein (146-160)
  source 1..45: mol_type = other RNA
agccagtccggcgggtactctgacagatcaagtggaggtagctat

SEQ ID NO: 75806 - RNA, 24 nt, synthetic construct
  misc_feature 1..24: note = Neuron navigator 2 (999-1006)
  source 1..24: mol_type = other RNA
agccaggtggagagaaactccctg

SEQ ID NO: 75807 - RNA, 30 nt, synthetic construct
  misc_feature 1..30: note = Microtubule-actin cross-linking factor 1 (2589-2598)
  source 1..30: mol_type = other RNA
agccaggtgcaaaaggagctgcagtccatc

SEQ ID NO: 75808 - RNA, 30 nt, synthetic construct
  misc_feature 1..30: note = Rho GTPase-activating protein 5 (922-931)
  source 1..30: mol_type = other RNA
agccagtaccacagacaaaccgaggtgttc

SEQ ID NO: 75809 - RNA, 30 nt, synthetic construct
  misc_feature 1..30: note = Histone-lysine N-methyltransferase setd3 (208-217)
  source 1..30: mol_type = other RNA
agccagtacaagaacaccgccagacaatat

SEQ ID NO: 75810 - RNA, 27 nt, synthetic construct
  misc_feature 1..27: note = Protein unc-45 homolog A (578-586)
  source 1..27: mol_type = other RNA
agcagactggaggaaaggtccgtgctc

SEQ ID NO: 75811 - RNA, 51 nt, synthetic construct
  misc_feature 1..51: note = ELL-associated factor 1 (232-248)
  source 1..51: mol_type = other RNA
agcagacccgccgtggctaacggcacctccaggcctcaggggtctaatcaa

SEQ ID NO: 75812 - RNA, 51 nt, synthetic construct
  misc_feature 1..51: note = Cold-inducible RNA-binding protein (144-160)
  source 1..51: mol_type = other RNA
agcagatcccagtctggcgggtactcagacaggagtagcggaggttcctat

SEQ ID NO: 75813 - RNA, 27 nt, synthetic construct
  misc_feature 1..27: note = Phosphatase and actin regulator (216-224)
  source 1..27: mol_type = other RNA
agctccgccaagcccggccctgctctg

SEQ ID NO: 75814 - RNA, 30 nt, synthetic construct
  misc_feature 1..30: note = LIM domain-binding protein 3 (265-274)
  source 1..30: mol_type = other RNA
agctccgcccccgctacccacacatcttac

SEQ ID NO: 75815 - RNA, 27 nt, synthetic construct
  misc_feature 1..27: note = Serine incorporator 5 (337-345)
  source 1..27: mol_type = other RNA
agctccgacgccctgcagggcagatac

SEQ ID NO: 75816 - RNA, 30 nt, synthetic construct; identical to SEQ ID NO: 51589
  misc_feature 1..30: note = F-box-like/WD repeat-containing protein TBL1XR1 (4-13)
  source 1..30: mol_type = other RNA

SEQ ID NO: 75817 - RNA, 30 nt, synthetic construct
  misc_feature 1..30: note = Poly (ADP-ribose) polymerase 1 (4-13)
  source 1..30: mol_type = other RNA
agctccgacaagctgtacagagtggagtat

SEQ ID NO: 75818 - RNA, 27 nt, synthetic construct
  misc_feature 1..27: note = ATP-dependent RNA helicase DDX18 (602-610)
  source 1..27: mol_type = other RNA
agctccgactctagacagttctcacac

SEQ ID NO: 75819 - RNA, 27 nt, synthetic construct
  misc_feature 1..27: note = Heterogeneous nuclear ribonucleoprotein H2 (441-449)
  source 1..27: mol_type = other RNA
agctccgactaccagtctaacctggcc

SEQ ID NO: 75820 - RNA, 33 nt, synthetic construct
  misc_feature 1..33: note = Tyrosinase (146-156)
  source 1..33: mol_type = other RNA
agctccgactacgtgatccccattggcacctat

SEQ ID NO: 75821 - RNA, 27 nt, synthetic construct
  misc_feature 1..27: note = Nesprin-2 (2105-2113)
  source 1..27: mol_type = other RNA
agctccgaggcccccctggtgcagaag

SEQ ID NO: 75822 - RNA, 33 nt, synthetic construct
  misc_feature 1..33: note = Osteopontin (26-36)
  source 1..33: mol_type = other RNA
agctccgaggaaaagcagctgtacaacaaatat

SEQ ID NO: 75823 - RNA, 27 nt, synthetic construct
  misc_feature 1..27: note = Carbohydrate sulfotransferase 11 (323-331)
  source 1..27: mol_type = other RNA
agctccgagcaccagacccaactgtac

SEQ ID NO: 75824 - RNA, 30 nt, synthetic construct
  misc_feature 1..30: note = Serine/threonine-protein kinase PLK2 (666-675)
  source 1..30: mol_type = other RNA
agctccgagctgaagaacagaatggaatac

SEQ ID NO: 75825 - RNA, 27 nt, synthetic construct
  misc_feature 1..27: note = Neuron navigator 2 (1837-1845)
  source 1..27: mol_type = other RNA
agctccttcaagcaggcctttggcaaa

SEQ ID NO: 75826 - RNA, 27 nt, synthetic construct
  misc_feature 1..27: note = Protein GREB1 (296-304)
  source 1..27: mol_type = other RNA
agctccttcagacccctgctctctaag

SEQ ID NO: 75827 - RNA, 42 nt, synthetic construct
  misc_feature 1..42: note = Keratin, type I cytoskeletal 10 (370-383)
  source 1..42: mol_type = other RNA
agctccggctctgtgggggagtcaagtagcaagggacccaga

SEQ ID NO: 75828 - RNA, 24 nt, synthetic construct
  misc_feature 1..24: note = Olfactory receptor 52E1 (66-73)
  source 1..24: mol_type = other RNA
agctccatcgaccccggcctgtct

SEQ ID NO: 75829 - RNA, 27 nt, synthetic construct
  misc_feature 1..27: note = E3 ubiquitin-protein ligase HUWE1 (114-122)
  source 1..27: mol_type = other RNA
agctccatcgagcacctgaccacactc

SEQ ID NO: 75830 - RNA, 27 nt, synthetic construct
  misc_feature 1..27: note = Zinc finger FYVE domain-containing protein 16 (841-849)
  source 1..27: mol_type = other RNA
agctccatcccctctcctgccaccctg

SEQ ID NO: 75831 - RNA, 36 nt, synthetic construct
  misc_feature 1..36: note = HBS1-like protein (521-532)
  source 1..36: mol_type = other RNA
agctccaagctgggcaaaaactctaatttcgccaag

SEQ ID NO: 75832 - RNA, 33 nt, synthetic construct
  misc_feature 1..33: note = Zinc finger protein 43 (404-414)
  source 1..33: mol_type = other RNA
agctccaagctgaccgagcacaaactcacacat

SEQ ID NO: 75833 - RNA, 33 nt, synthetic construct
  misc_feature 1..33: note = RalBP1-associated Eps domain-containing protein 1 (509-519)
  source 1..33: mol_type = other RNA
agctccctggacatgaacagaaccttcacagtg

SEQ ID NO: 75834 - RNA, 33 nt, synthetic construct
  misc_feature 1..33: note = Chromodomain-helicase-DNA-binding protein 9 (261-271)
  source 1..33: mol_type = other RNA
agctccctggaggaaaacctccttcaccaggtg

SEQ ID NO: 75835 - RNA, 33 nt, synthetic construct
  misc_feature 1..33: note = Spectrin beta chain, non-erythrocytic 1 (1556-1566)
  source 1..33: mol_type = other RNA
agctccctgtctgccgaggctatcagacagagg

SEQ ID NO: 75836 - RNA, 33 nt, synthetic construct
  misc_feature 1..33: note = Eukaryotic translation initiation factor 3 subunit C-like protein (15-25)
  source 1..33: mol_type = other RNA
agctccctgtctggcgaggaactcgtgaccaag

SEQ ID NO: 75837 - RNA, 30 nt, synthetic construct
  misc_feature 1..30: note = COMM domain-containing protein 10 (123-132)
  source 1..30: mol_type = other RNA
agctccatgggccaggagaccgtggaaaag

SEQ ID NO: 75838 - RNA, 33 nt, synthetic construct
  misc_feature 1..33: note = Liprin-alpha-1 (1168-1178)
  source 1..33: mol_type = other RNA
agctccatgtcttcacccagtatgcagcctaag

SEQ ID NO: 75839 - RNA, 27 nt, synthetic construct
  misc_feature 1..27: note = Exostosin-2 (52-60)
  source 1..27: mol_type = other RNA
agctccaacgactggaatgtggagaag

SEQ ID NO: 75840 - RNA, 42 nt, synthetic construct
  misc_feature 1..42: note = Membrane magnesium transporter 1 (109-122)
  source 1..42: mol_type = other RNA
agctccaaccaggacgccctgtcttcaaataccagtctcaag

SEQ ID NO: 75841 - RNA, 51 nt, synthetic construct
  misc_feature 1..51: note = Vimentin (55-71)
  source 1..51: mol_type = other RNA
agctcccccggcggggtgtacgccaccagatcttcagctgtcaggctgcgg

SEQ ID NO: 75842 - RNA, 27 nt, synthetic construct
  misc_feature 1..27: note = Coatomer subunit gamma-1 (297-305)
  source 1..27: mol_type = other RNA
agctcccccaaggccgctctgagatac

SEQ ID NO: 75843 - RNA, 27 nt, synthetic construct
  misc_feature 1..27: note = RING finger protein 10 (486-494)
  source 1..27: mol_type = other RNA
agctcccagcaagagcccatcaccaag

SEQ ID NO: 75844 - RNA, 27 nt, synthetic construct
  misc_feature 1..27: note = FERM domain-containing protein 4A (829-837)
  source 1..27: mol_type = other RNA
agctcccagtacagaatcaaggagtat

SEQ ID NO: 75845 - RNA, 39 nt, synthetic construct
  misc_feature 1..39: note = Chondroitin sulfate proteoglycan 4 (1608-1620)
  source 1..39: mol_type = other RNA
agctcctctgccggcaccgacccccagctgctcctttac

SEQ ID NO: 75846 - RNA, 27 nt, synthetic construct
  misc_feature 1..27: note = Ankyrin-2 (960-968)
  source 1..27: mol_type = other RNA
agctcctctcccatccactcaggcttc

SEQ ID NO: 75847 - RNA, 36 nt, synthetic construct
  misc_feature 1..36: note = Reticulon-4 (429-440)
  source 1..36: mol_type = other RNA
agctcctctcccctggaggcctcaagtgtgaactac

SEQ ID NO: 75848 - RNA, 27 nt, synthetic construct
  misc_feature 1..27: note = Histone acetyltransferase KAT6A (999-1007)
  source 1..27: mol_type = other RNA
agctcctctccccctatcctgaccaag

SEQ ID NO: 75849 - RNA, 27 nt, synthetic construct
  misc_feature 1..27: note = Heterogeneous nuclear ribonucleoprotein U-like protein 1 (97-105)
  source 1..27: mol_type = other RNA
agctcctctagacccatcgtgcagaag

SEQ ID NO: 75850 - RNA, 42 nt, synthetic construct
  misc_feature 1..42: note = Retinoic acid-induced protein 1 (223-236)
  source 1..42: mol_type = other RNA
agctcctctgtgcagggcgggggacaaggtgcccactcatac

SEQ ID NO: 75851 - RNA, 36 nt, synthetic construct
  misc_feature 1..36: note = Helicase-like transcription factor (446-457)
  source 1..36: mol_type = other RNA
agctccgtgcccaccacaaagaaaaagatgctgaaa

SEQ ID NO: 75852 - RNA, 27 nt, synthetic construct
  misc_feature 1..27: note = Loss of heterozygosity 12 chromosomal region 1 protein (18-26)
  source 1..27: mol_type = other RNA
agctccgtgaccccctctcctgccaag

SEQ ID NO: 75853 - RNA, 27 nt, synthetic construct
  misc_feature 1..27: note = Ral GTPase-activating protein subunit beta (647-655)
  source 1..27: mol_type = other RNA
agctcctacgacaagcccatcaccttc

SEQ ID NO: 75854 - RNA, 27 nt, synthetic construct
  misc_feature 1..27: note = Protein kinase C and casein kinase substrate in neurons protein 2 (345-353)
  source 1..27: mol_type = other RNA
agctcctacgagaagacccagtcttat

SEQ ID NO: 75855 - RNA, 27 nt, synthetic construct
  misc_feature 1..27: note = CD99 antigen-like protein 2 (60-68)
  source 1..27: mol_type = other RNA
agctcctacatctcttatcagcaaaag

SEQ ID NO: 75856 - RNA, 27 nt, synthetic construct
  misc_feature 1..27: note = U4/U6 small nuclear ribonucleoprotein Prp31 (226-234)
  source 1..27: mol_type = other RNA
agcaccgccgctaagatcatgggcgtg

SEQ ID NO: 75857 - RNA, 42 nt, synthetic construct
  misc_feature 1..42: note = Heterogeneous nuclear ribonucleoprotein H (363-376)
  source 1..42: mol_type = other RNA
agcaccgccggcgcttccgggggagcatacgagcacagatat

SEQ ID NO: 75858 - RNA, 39 nt, synthetic construct
  misc_feature 1..39: note = Heterogeneous nuclear ribonucleoprotein H (363-375)
  source 1..39: mol_type = other RNA
agcaccgccggcgcttccgggggagcatacggttctcag

SEQ ID NO: 75859 - RNA, 27 nt, synthetic construct
  misc_feature 1..27: note = Complement component 1 Q subcomponent-binding protein, mitochondrial (175-183)
  source 1..27: mol_type = other RNA
agcaccgccctggagcaccaggaatac

SEQ ID NO: 75860 - RNA, 30 nt, synthetic construct
  misc_feature 1..30: note = JmjC domain-containing protein 8 (89-98)
  source 1..30: mol_type = other RNA
agcaccgccaacacatactcctatcacaag

SEQ ID NO: 75861 - RNA, 36 nt, synthetic construct
  misc_feature 1..36: note = Transcription initiation factor TFIID subunit 6 (584-595)
  source 1..36: mol_type = other RNA
agcaccgccccctccggccctgggtctgtgcagaag

SEQ ID NO: 75862 - RNA, 30 nt, synthetic construct
  misc_feature 1..30: note = IQ motif and SEC7 domain-containing protein 2 (10-19)
  source 1..30: mol_type = other RNA
agcaccgcctcccacacactgcatcagtac

SEQ ID NO: 75863 - RNA, 27 nt, synthetic construct
  misc_feature 1..27: note = 116 kDa U5 small nuclear ribonucleoprotein component (483-491)
  source 1..27: mol_type = other RNA
agcaccgacgatggcgtgcagttccac

SEQ ID NO: 75864 - RNA, 24 nt, synthetic construct
  misc_feature 1..24: note = Neuropilin-2 (829-836)
  source 1..24: mol_type = other RNA
agcaccgacaaggagaaatcctgg

SEQ ID NO: 75865 - RNA, 30 nt, synthetic construct
  misc_feature 1..30: note = Immunoglobulin superfamily member 3 (124-133)
  source 1..30: mol_type = other RNA
agcaccgacaagcagtacttcggctcctat

SEQ ID NO: 75866 - RNA, 30 nt, synthetic construct
  misc_feature 1..30: note = Transcription initiation factor TFIID subunit 7-like (113-122)
  source 1..30: mol_type = other RNA
agcaccgaccccaacatcgtgagaaagaaa

SEQ ID NO: 75867 - RNA, 33 nt, synthetic construct
  misc_feature 1..33: note = Transcription factor HES-1 (101-111)
  source 1..33: mol_type = other RNA
agcaccgacccctccgtgctgggcaagtacaga

SEQ ID NO: 75868 - RNA, 39 nt, synthetic construct
  misc_feature 1..39: note = RNA-binding protein FUS (44-56)
  source 1..39: mol_type = other RNA
agcaccgacacatccggctacgggcagtcttcatatagt

SEQ ID NO: 75869 - RNA, 30 nt, synthetic construct
  misc_feature 1..30: note = Latent-transforming growth factor beta-binding protein 2 (1572-1581)
  source 1..30: mol_type = other RNA
agcaccgaggacctgcccgatcacgacatc

SEQ ID NO: 75870 - RNA, 33 nt, synthetic construct
  misc_feature 1..33: note = Baculoviral IAP repeat-containing protein 6 (2019-2029)
  source 1..33: mol_type = other RNA
agcaccgagcagctgagaacaatcattaggtac

SEQ ID NO: 75871 - RNA, 27 nt, synthetic construct
  misc_feature 1..27: note = Cathepsin L1 (287-295)
  source 1..27: mol_type = other RNA
agcaccgagtccgacaacaataagtac

SEQ ID NO: 75872 - RNA, 42 nt, synthetic construct
  misc_feature 1..42: note = DNA-dependent protein kinase catalytic subunit (1861-1874)
  source 1..42: mol_type = other RNA
agcaccttcgacacacagatcactaagaaaatgggctactat

SEQ ID NO: 75873 - RNA, 33 nt, synthetic construct
  misc_feature 1..33: note = Zinc finger protein 280B (174-184)
  source 1..33: mol_type = other RNA
agcaccttcgaggtgaactccatcaatcccaag

SEQ ID NO: 75874 - RNA, 27 nt, synthetic construct
  misc_feature 1..27: note = Brain-specific angiogenesis inhibitor 1-associated protein 2-like protein 1 (460-468)
  source 1..27: mol_type = other RNA
agcaccttcaaggcccccgcttccaaa

SEQ ID NO: 75875 - RNA, 30 nt, synthetic construct
  misc_feature 1..30: note = Sex comb on midleg-like protein 4 (11-20)
  source 1..30: mol_type = other RNA
agcaccttcaaccacagaggctccctgcat

SEQ ID NO: 75876 - RNA, 27 nt, synthetic construct
  misc_feature 1..27: note = Transmembrane emp24 domain-containing protein 3 (107-115)
  source 1..27: mol_type = other RNA
agcaccttctcccacaagacagtgtac

SEQ ID NO: 75877 - RNA, 27 nt, synthetic construct
  misc_feature 1..27: note = Alstrom syndrome protein 1 (1095-1103)
  source 1..27: mol_type = other RNA
agcaccttctactcccagagagagaag

SEQ ID NO: 75878 - RNA, 30 nt, synthetic construct
  misc_feature 1..30: note = Protein FAM91A1 (429-438)
  source 1..30: mol_type = other RNA
agcaccggcgagggggaagcccagagatac

SEQ ID NO: 75879 - RNA, 27 nt, synthetic construct
  misc_feature 1..27: note = N-acetylglucosamine-1-phosphodiester alpha-N-acetylglucosaminidase (4-12)
  source 1..27: mol_type = other RNA
agcaccggcagatggctgctccttagg

SEQ ID NO: 75880 - RNA, 27 nt, synthetic construct
  misc_feature 1..27: note = Vacuolar protein sorting-associated protein 16 homolog (322-330)
  source 1..27: mol_type = other RNA
agcacccacgagttcctgcatgaagtg

SEQ ID NO: 75881 - RNA, 27 nt, synthetic construct
  misc_feature 1..27: note = Bifunctional lysine-specific demethylase and histidyl-hydroxylase MINA (251-259)
  source 1..27: mol_type = other RNA
agcacccacgtgacaatctccacttac

SEQ ID NO: 75882 - RNA, 30 nt, synthetic construct
  misc_feature 1..30: note = Clathrin interactor 1 (210-219)
  source 1..30: mol_type = other RNA
agcaccatcgacgatacaatttccaagttc

SEQ ID NO: 75883 - RNA, 27 nt, synthetic construct
  misc_feature 1..27: note = Prolyl 4-hydroxylase subunit alpha-1 (200-208)
  source 1..27: mol_type = other RNA
agcaccatcgacaaggtgtccgtcctg

SEQ ID NO: 75884 - RNA, 30 nt, synthetic construct; identical to SEQ ID NO: 51657
  misc_feature 1..30: note = EPB41 protein (372-381)
  source 1..30: mol_type = other RNA

SEQ ID NO: 75885 - RNA, 27 nt, synthetic construct
  misc_feature 1..27: note = Calcium-independent phospholipase A2-gamma (310-318)
  source 1..27: mol_type = other RNA
agcaccaagcagtccatcgccaacttc

SEQ ID NO: 75886 - RNA, 27 nt, synthetic construct
  misc_feature 1..27: note = Kanadaptin (547-555)
  source 1..27: mol_type = other RNA
agcaccctggacggcgtgtccagaaag

SEQ ID NO: 75887 - RNA, 30 nt, synthetic construct
  misc_feature 1..30: note = Serologically defined colon cancer antigen 8 (8-17)
  source 1..30: mol_type = other RNA
agcaccctggaggaaatcctcggccagtac

SEQ ID NO: 75888 - RNA, 27 nt, synthetic construct
  misc_feature 1..27: note = Serine-protein kinase ATM (934-942)
  source 1..27: mol_type = other RNA
agcaccctggagcccacaaagtccctc

SEQ ID NO: 75889 - RNA, 33 nt, synthetic construct; identical to SEQ ID NO: 51662
  misc_feature 1..33: note = DNA-directed RNA polymerase I subunit RPA1 (376-386)
  source 1..33: mol_type = other RNA

SEQ ID NO: 75890 - RNA, 27 nt, synthetic construct
  misc_feature 1..27: note = Myb-related protein B (600-608)
  source 1..27: mol_type = other RNA
agcaccctgcccaagtccctctctctt

SEQ ID NO: 75891 - RNA, 30 nt, synthetic construct
  misc_feature 1..30: note = Zinc finger protein 212 (21-30)
  source 1..30: mol_type = other RNA
agcaccctgccctcccaggccacagagaag

SEQ ID NO: 75892 - RNA, 39 nt, synthetic construct
  misc_feature 1..39: note = Myelin basic protein (20-32)
  source 1..39: mol_type = other RNA
agcaccatggaccacgccagacatggcttcctgcccagg

SEQ ID NO: 75893 - RNA, 27 nt, synthetic construct
  misc_feature 1..27: note = Coatomer subunit gamma-1 (134-142)
  source 1..27: mol_type = other RNA
agcaccatgctgcaggccatcgagaga

SEQ ID NO: 75894 - RNA, 27 nt, synthetic construct
  misc_feature 1..27: note = SHC SH2 domain-binding protein 1 (299-307)
  source 1..27: mol_type = other RNA
agcaccatgatggccggcctgctcaga

SEQ ID NO: 75895 - RNA, 27 nt, synthetic construct
  misc_feature 1..27: note = Forkhead box protein O1 (544-552)
  source 1..27: mol_type = other RNA
agcaccatgccccacacatccggcatg

SEQ ID NO: 75896 - RNA, 27 nt, synthetic construct
  misc_feature 1..27: note = Transmembrane protein 248 (87-95)
  source 1..27: mol_type = other RNA
agcaccatgacatccggccaggccaga

SEQ ID NO: 75897 - RNA, 27 nt, synthetic construct
  misc_feature 1..27: note = Calcium uptake protein 1, mitochondrial (122-130)
  source 1..27: mol_type = other RNA
agcacccccgacaagatcttcagatac

SEQ ID NO: 75898 - RNA, 30 nt, synthetic construct
  misc_feature 1..30: note = C-Jun-amino-terminal kinase-interacting protein 4 (350-359)
  source 1..30: mol_type = other RNA
agcacccccacaaagggcatcgagaacaaa

SEQ ID NO: 75899 - RNA, 27 nt, synthetic construct
  misc_feature 1..27: note = Transcription elongation factor A protein 1 (135-143)
  source 1..27: mol_type = other RNA
agcacctccgactctgtgagactgaag

SEQ ID NO: 75900 - RNA, 30 nt, synthetic construct
  misc_feature 1..30: note = LisH domain-containing protein ARMC9 (382-391)
  source 1..30: mol_type = other RNA
agcacctccgacgtggtcagacagtacatg

SEQ ID NO: 75901 - RNA, 33 nt, synthetic construct; identical to SEQ ID NO: 51674
  misc_feature 1..33: note = Endoplasmin (187-197)
  source 1..33: mol_type = other RNA

SEQ ID NO: 75902 - RNA, 27 nt, synthetic construct
  misc_feature 1..27: note = Enhancer of mRNA-decapping protein 4 (165-173)
  source 1..27: mol_type = other RNA
agcacctccgagagaacactgctcaag

SEQ ID NO: 75903 - RNA, 27 nt, synthetic construct
  misc_feature 1..27: note = Versican core protein (1942-1950)
  source 1..27: mol_type = other RNA
agcaccgtgtcccaccccatcgccaag

SEQ ID NO: 75904 - RNA, 27 nt, synthetic construct
  misc_feature 1..27: note = E3 ubiquitin-protein ligase ZNRF1 (95-103)
  source 1..27: mol_type = other RNA
agcacctacgcccacggcaacgggtat

SEQ ID NO: 75905 - RNA, 39 nt, synthetic construct
  misc_feature 1..39: note = Epithelial discoidin domain-containing receptor 1 (213-225)
  source 1..39: mol_type = other RNA
agcacctacgacggccacacagtggggggactgcagtat

SEQ ID NO: 75906 - RNA, 30 nt, synthetic construct
  misc_feature 1..30: note = Regulator of microtubule dynamics protein 1 (239-248)
  source 1..30: mol_type = other RNA
agcacctacgagaaggccctgggctatttc

SEQ ID NO: 75907 - RNA, 27 nt, synthetic construct
  misc_feature 1..27: note = Zinc finger protein 627 (490-498)
  source 1..27: mol_type = other RNA
agcacctacttcagagtgcacgagaag

SEQ ID NO: 75908 - RNA, 33 nt, synthetic construct
  misc_feature 1..33: note = Heat shock protein HSP 90-alpha (724-734)
  source 1..33: mol_type = other RNA
agcacctacggctggacagccaacatggagaga

SEQ ID NO: 75909 - RNA, 27 nt, synthetic construct
  misc_feature 1..27: note = Phosphomevalonate kinase (66-74)
  source 1..27: mol_type = other RNA
agcacctacaaggaggccttcagaaaa

SEQ ID NO: 75910 - RNA, 33 nt, synthetic construct
  misc_feature 1..33: note = Acid ceramidase (33-43)
  source 1..33: mol_type = other RNA
agcacctaccccccttccggcccaacatataga

SEQ ID NO: 75911 - RNA, 33 nt, synthetic construct
  misc_feature 1..33: note = Mitochondrial basic amino acids transporter (140-150)
  source 1..33: mol_type = other RNA
agcacctaccccgtggacgtcgttaagtccaga

SEQ ID NO: 75912 - RNA, 30 nt, synthetic construct
  misc_feature 1..30: note = Protein tweety homolog 2 (519-528)
  source 1..30: mol_type = other RNA
agcgtggccgacgagcacctgagacattac

SEQ ID NO: 75913 - RNA, 33 nt, synthetic construct
  misc_feature 1..33: note = BMP-2-inducible protein kinase (599-609)
  source 1..33: mol_type = other RNA
agcgtggccgacaaggaggctatcgcaaacttc

SEQ ID NO: 75914 - RNA, 27 nt, synthetic construct
  misc_feature 1..27: note = Adenomatous polyposis coli protein 2 (774-782)
  source 1..27: mol_type = other RNA
agcgtggcctccaaggctctgcagaaa

SEQ ID NO: 75915 - RNA, 33 nt, synthetic construct
  misc_feature 1..33: note Dolichyl-diphosphooligosaccharide-proteinosyltransferase subunit 2 (312-322)
  source 1..33: mol_type = other RNA
agcgtggcctccagagctaccgtcctgcagaag

SEQ ID NO: 75916 - RNA, 30 nt, synthetic construct
  misc_feature 1..30: note = DNA-directed RNA polymerase III subunit RPC5 (347-356)
  source 1..30: mol_type = other RNA
agcgtggccgtcctgagaggcatccagaag

SEQ ID NO: 75917 - RNA, 27 nt, synthetic construct
  misc_feature 1..27: note = Epididymal secretory protein E1 (29-37)
  source 1..27: mol_type = other RNA
agcgtggacggcgtcatcaaggaggtt

SEQ ID NO: 75918 - RNA, 33 nt, synthetic construct
  misc_feature 1..33: note = Chromodomain-helicase-DNA-binding protein 4 (628-638)
  source 1..33: mol_type = other RNA
agcgtggacaagaaaggccacgtccattacctg

SEQ ID NO: 75919 - RNA, 30 nt, synthetic construct
  misc_feature 1..30: note = U3 small nucleolar ribonucleoprotein protein MPP10 (594-603)
  source 1..30: mol_type = other RNA
agcgtggaccaggccggcaagtactccaaa

SEQ ID NO: 75920 - RNA, 30 nt, synthetic construct
  misc_feature 1..30: note = Nucleolar protein 11 (28-37)
  source 1..30: mol_type = other RNA
agcgtggacagaaagttcatctccctgatg

SEQ ID NO: 75921 - RNA, 30 nt, synthetic construct
  misc_feature 1..30: note = Peroxisomal multifunctional enzyme type 2 (75-84)
  source 1..30: mol_type = other RNA
agcgtggaggaaggcgagaaggtcgttaaa

SEQ ID NO: 75922 - RNA, 33 nt, synthetic construct
  misc_feature 1..33: note = Cytochrome c oxidase subunit 7C, mitochondrial (30-40)
  source 1..33: mol_type = other RNA
agcgtggagaacaagtggtccctgctcgccaaa

SEQ ID NO: 75923 - RNA, 33 nt, synthetic construct
  misc_feature 1..33: note = Histone acetyltransferase KAT7 (249-259)
  source 1..33: mol_type = other RNA
agcgtgttcgaggtcgacggcaagaaaaacaag

SEQ ID NO: 75924 - RNA, 36 nt, synthetic construct
  misc_feature 1..36: note = Receptor-type tyrosine-protein phosphatase zeta (1032-1043)
  source 1..36: mol_type = other RNA
agcgtgttcggcgacgataacaaggccctgtccaaa

SEQ ID NO: 75925 - RNA, 39 nt, synthetic construct
  misc_feature 1..39: note = Calcium-binding mitochondrial carrier protein SCaMC-2 (37-49)
  source 1..39: mol_type = other RNA
agcgtgttcatcccctcccaggagttttctacctacaga

SEQ ID NO: 75926 - RNA, 30 nt, synthetic construct
  misc_feature 1..30: note = LIX1-like protein (121-130)
  source 1..30: mol_type = other RNA
agcgtgttcaacgagcacccctccagaagg

SEQ ID NO: 75927 - RNA, 27 nt, synthetic construct
  misc_feature 1..27: note = Ras-associated and pleckstrin homology domains-containing protein 1 (627-635)
  source 1..27: mol_type = other RNA
agcgtgttctccgaggcctggaagaga

SEQ ID NO: 75928 - RNA, 36 nt, synthetic construct
  misc_feature 1..36: note = Formin-1 (1148-1159)
  source 1..36: mol_type = other RNA
agcgtgttctccgagggcatcacctctctgcacaga

SEQ ID NO: 75929 - RNA, 27 nt, synthetic construct
  misc_feature 1..27: note = Transcription activator BRG1 (1587-1595)
  source 1..27: mol_type = other RNA
agcgtgttcacctccgtcagacagaag

SEQ ID NO: 75930 - RNA, 33 nt, synthetic construct
  misc_feature 1..33: note = Ras-related protein Rab-6B (23-33)
  source 1..33: mol_type = other RNA
agcgtgggcaagacctccctgatcacaagattc

SEQ ID NO: 75931 - RNA, 27 nt, synthetic construct
  misc_feature 1..27: note = Rho guanine nucleotide exchange factor 17 (885-893)
  source 1..27: mol_type = other RNA
agcgtgatcgacaccgcctccaagtac

SEQ ID NO: 75932 - RNA, 27 nt, synthetic construct
  misc_feature 1..27: note = Transmembrane emp24 domain-containing protein 7 (151-159)
  source 1..27: mol_type = other RNA
agcgtgatcgactaccagacccacttc

SEQ ID NO: 75933 - RNA, 30 nt, synthetic construct
  misc_feature 1..30: note = BTB/POZ domain-containing protein 9 (367-376)
  source 1..30: mol_type = other RNA
agcgtgatcgagggcgtctccagatctagg

SEQ ID NO: 75934 - RNA, 30 nt, synthetic construct
  misc_feature 1..30: note = Protein dopey-2 (19-28)
  source 1..30: mol_type = other RNA
agcgtgatcgagaaggccctgagaaacttc

SEQ ID NO: 75935 - RNA, 27 nt, synthetic construct
  misc_feature 1..27: note = Inactive phospholipase C-like protein 1 (372-380)
  source 1..27: mol_type = other RNA
agcgtgatcgaggtcattaacaagttc

SEQ ID NO: 75936 - RNA, 27 nt, synthetic construct
  misc_feature 1..27: note = Carbohydrate sulfotransferase 10 (278-286)
  source 1..27: mol_type = other RNA
agcgtgatcggccaccatgagaccctg

SEQ ID NO: 75937 - RNA, 27 nt, synthetic construct
  misc_feature 1..27: note = E3 ubiquitin-protein ligase RBBP6 (1347-1355)
  source 1..27: mol_type = other RNA
agcgtgatcaagaacgtctccaccaaa

SEQ ID NO: 75938 - RNA, 30 nt, synthetic construct
  misc_feature 1..30: note = FERM domain-containing protein 6 (60-69)
  source 1..30: mol_type = other RNA
agcgtgatccagaacaatgagcacgtctac

SEQ ID NO: 75939 - RNA, 30 nt, synthetic construct
  misc_feature 1..30: note = Vacuolar protein sorting-associated protein 11 homolog (769-778)
  source 1..30: mol_type = other RNA
agcgtgatcagagactacctggtccagaag

SEQ ID NO: 75940 - RNA, 30 nt, synthetic construct
  misc_feature 1..30: note = Choline kinase alpha (114-123)
  source 1..30: mol_type = other RNA
agcgtgatcagaggcgggctgtccaacatg

SEQ ID NO: 75941 - RNA, 33 nt, synthetic construct
  misc_feature 1..33: note = Lipid phosphate phosphatase-related protein type 3 (109-119)
  source 1..33: mol_type = other RNA
agcgtgatctccgacaccacaaagctgctcaaa

SEQ ID NO: 75942 - RNA, 30 nt, synthetic construct; identical to SEQ ID NO: 51715
  misc_feature 1..30: note = E3 ubiquitin-protein ligase MYCBP2 (613-622)
  source 1..30: mol_type = other RNA

SEQ ID NO: 75943 - RNA, 33 nt, synthetic construct
  misc_feature 1..33: note = ATPase family AAA domain-containing protein 2 (1033-1043)
  source 1..33: mol_type = other RNA
agcgtgatctccaagattgacctgcacaaatac

SEQ ID NO: 75944 - RNA, 27 nt, synthetic construct
  misc_feature 1..27: note = Pro-interleukin-16 (212-220)
  source 1..27: mol_type = other RNA
agcgtgatctccaacattgtcctgatg

SEQ ID NO: 75945 - RNA, 30 nt, synthetic construct
  misc_feature 1..30: note Dolichyl-diphosphooligosaccharide-proteinosyltransferase subunit DAD1 (7-16)
  source 1..30: mol_type = other RNA
agcgtgatctccagattcctggaggaatac

SEQ ID NO: 75946 - RNA, 30 nt, synthetic construct
  misc_feature 1..30: note = Fanconi anemia group A protein (283-292)
  source 1..30: mol_type = other RNA
agcgtgatctccaccgaccccctgaagaga

SEQ ID NO: 75947 - RNA, 27 nt, synthetic construct
  misc_feature 1..27: note = Vacuolar protein sorting-associated protein 13C (3201-3209)
  source 1..27: mol_type = other RNA
agcgtgatcaccagattcaacgagtac

SEQ ID NO: 75948 - RNA, 27 nt, synthetic construct
  misc_feature 1..27: note = Acyl-CoA dehydrogenase family member 9, mitochondrial (237-245)
  source 1..27: mol_type = other RNA
agcgtgaaggacaaaatcaccgccttc

SEQ ID NO: 75949 - RNA, 42 nt, synthetic construct
  misc_feature 1..42: note = Ran-specific GTPase-activating protein (187-200)
  source 1..42: mol_type = other RNA
agcgtgaaggaggaaaccaaagaggacgccgaagagaagcag

SEQ ID NO: 75950 - RNA, 42 nt, synthetic construct
  misc_feature 1..42: note = 39S ribosomal protein L48, mitochondrial (94-107)
  source 1..42: mol_type = other RNA
agcgtgaaggagcacaccgaagaggacttcaaaggcagattt

SEQ ID NO: 75951 - RNA, 27 nt, synthetic construct
  misc_feature 1..27: note = CTP synthase 1 (225-233)
  source 1..27: mol_type = other RNA
agcgtgaaggagaaaatctccatgttc

SEQ ID NO: 75952 - RNA, 27 nt, synthetic construct
  misc_feature 1..27: note = Amyloid protein-binding protein 2 (95-103)
  source 1..27: mol_type = other RNA
agcgtgctggcctactccttctctaga

SEQ ID NO: 75953 - RNA, 33 nt, synthetic construct
  misc_feature 1..33: note = Cytoplasmic dynein 1 heavy chain 1 (2317-2327)
  source 1..33: mol_type = other RNA
agcgtgctggacgataacaagctccttaccctg

SEQ ID NO: 75954 - RNA, 27 nt, synthetic construct
  misc_feature 1..27: note = Interferon-induced GTP-binding protein Mx1 (85-93)
  source 1..27: mol_type = other RNA
agcgtgctggaggccctctccggcgtc

SEQ ID NO: 75955 - RNA, 36 nt, synthetic construct
  misc_feature 1..36: note = Protein fem-1 homolog B (414-425)
  source 1..36: mol_type = other RNA
agcgtgctggagatcgaacagtccatgaacagagtc

SEQ ID NO: 75956 - RNA, 27 nt, synthetic construct
  misc_feature 1..27: note = Zinc finger MYM-type protein 6 (648-656)
  source 1..27: mol_type = other RNA
agcgtgctgaagggcgccgtcaccaaa

SEQ ID NO: 75957 - RNA, 27 nt, synthetic construct
  misc_feature 1..27: note = Pre-rRNA-processing protein TSR1 homolog (547-555)
  source 1..27: mol_type = other RNA
agcgtgctgaacatggtcgttagaagg

SEQ ID NO: 75958 - RNA, 30 nt, synthetic construct; identical to SEQ ID NO: 51731
  misc_feature 1..30: note = Protein tweety homolog 3 (286-295)
  source 1..30: mol_type = other RNA

SEQ ID NO: 75959 - RNA, 27 nt, synthetic construct
  misc_feature 1..27: note = Interleukin-1 receptor-associated kinase 1 (94-102)
  source 1..27: mol_type = other RNA
agcgtgctgtggccctggatcaacaga

SEQ ID NO: 75960 - RNA, 36 nt, synthetic construct
  misc_feature 1..36: note = Heat shock 70 kDa protein 14 (206-217)
  source 1..36: mol_type = other RNA
agcgtgatggaggtcaactccggcatctacagagtt

SEQ ID NO: 75961 - RNA, 33 nt, synthetic construct
  misc_feature 1..33: note = Synaptonemal complex protein SC65 (327-337)
  source 1..33: mol_type = other RNA
agcgtgatgcagcaaaacctggtctactataga

SEQ ID NO: 75962 - RNA, 27 nt, synthetic construct
  misc_feature 1..27: note = DNA replication licensing factor MCM5 (417-425)
  source 1..27: mol_type = other RNA
agcgtgatgagagacccctcctctagg

SEQ ID NO: 75963 - RNA, 30 nt, synthetic construct
  misc_feature 1..30: note = V-type proton ATPase 16 kDa proteolipid subunit (45-54)
  source 1..30: mol_type = other RNA
agcgtgatgagacccgagcagatcatgaag

SEQ ID NO: 75964 - RNA, 27 nt, synthetic construct
  misc_feature 1..27: note = Propionyl-CoA carboxylase beta chain, mitochondrial (34-42)
  source 1..27: mol_type = other RNA
agcgtgaacgagagaatcgaaaataag

SEQ ID NO: 75965 - RNA, 36 nt, synthetic construct
  misc_feature 1..36: note = A-kinase-interacting protein 1 (106-117)
  source 1..36: mol_type = other RNA
agcgtgcccgaggaaggcggggccacccacgtctac

SEQ ID NO: 75966 - RNA, 36 nt, synthetic construct
  misc_feature 1..36: note = Melanocyte protein PMEL (633-644)
  source 1..36: mol_type = other RNA
agcgtgccccagctgcctcactcctcttcacattgg

SEQ ID NO: 75967 - RNA, 30 nt, synthetic construct
  misc_feature 1..30: note = Nuclear distribution protein nudE homolog 1 (211-220)
  source 1..30: mol_type = other RNA
agcgtgccctccacccctatcgcccacaga

SEQ ID NO: 75968 - RNA, 30 nt, synthetic construct
  misc_feature 1..30: note = Krueppel-like factor 5 (213-222)
  source 1..30: mol_type = other RNA
agcgtgcccacccagcaaggccacctgtac

SEQ ID NO: 75969 - RNA, 36 nt, synthetic construct
  misc_feature 1..36: note = Retinoic acid-induced protein 1 (225-236)
  source 1..36: mol_type = other RNA
agcgtgcagggcgggggacaaggtgcccactcctac

SEQ ID NO: 75970 - RNA, 33 nt, synthetic construct
  misc_feature 1..33: note = Bcl-2-related protein A1 (43-53)
  source 1..33: mol_type = other RNA
agcgtgcagaaggaggtcgaaaaaaacctgaag

SEQ ID NO: 75971 - RNA, 27 nt, synthetic construct
  misc_feature 1..27: note = UDP-glucose 4-epimerase (97-105)
  source 1..27: mol_type = other RNA
agcgtgcagaagcccctggactactat

SEQ ID NO: 75972 - RNA, 27 nt, synthetic construct
  misc_feature 1..27: note = 40S ribosomal protein S16 (9-17)
  source 1..27: mol_type = other RNA
agcgtgcaggtcttcggcagaaagaaa

SEQ ID NO: 75973 - RNA, 27 nt, synthetic construct
  misc_feature 1..27: note = Serine/threonine-protein kinase 4 (109-117)
  source 1..27: mol_type = other RNA
agcgtgtccgacatcattagactgagg

SEQ ID NO: 75974 - RNA, 27 nt, synthetic construct
  misc_feature 1..27: note = Zinc transporter ZIP6 (243-251)
  source 1..27: mol_type = other RNA
agcgtgtccgagcccagaaagggcttc

SEQ ID NO: 75975 - RNA, 30 nt, synthetic construct
  misc_feature 1..30: note = MICOS complex subunit MIC60 (113-122)
  source 1..30: mol_type = other RNA
agcgtgtccgaggtcatgaaggaatctaaa

SEQ ID NO: 75976 - RNA, 36 nt, synthetic construct
  misc_feature 1..36: note = CDC42 small effector protein 2 (51-62)
  source 1..36: mol_type = other RNA
agcgtgtcctctatccagaaccaaatgcagtcaaag

SEQ ID NO: 75977 - RNA, 27 nt, synthetic construct
  misc_feature 1..27: note = Vimentin (5-13)
  source 1..27: mol_type = other RNA
agcgtgtcctcttcaagttacagaagg

SEQ ID NO: 75978 - RNA, 27 nt, synthetic construct
  misc_feature 1..27: note = Shootin-1 (9-17)
  source 1..27: mol_type = other RNA
agcgtgaccaagacagccctgaacaaa

SEQ ID NO: 75979 - RNA, 33 nt, synthetic construct
  misc_feature 1..33: note = LON peptidase N-terminal domain and RING finger protein 2 (607-617)
  source 1..33: mol_type = other RNA
agcgtggtcgacgccatcggcatttccagattc

SEQ ID NO: 75980 - RNA, 27 nt, synthetic construct
  misc_feature 1..27: note = Phosphatidylinositol 3-kinase regulatory subunit beta (397-405)
  source 1..27: mol_type = other RNA
agcgtggtcgacctgatcaaccactac

SEQ ID NO: 75981 - RNA, 27 nt, synthetic construct
  misc_feature 1..27: note = GRAM domain-containing protein 1A (439-447)
  source 1..27: mol_type = other RNA
agcgtggtcgagacccagacactgttc

SEQ ID NO: 75982 - RNA, 30 nt, synthetic construct
  misc_feature 1..30: note = Unconventional myosin-VI (74-83)
  source 1..30: mol_type = other RNA
agcgtggtcggcgggttcgtttcccactac

SEQ ID NO: 75983 - RNA, 33 nt, synthetic construct
  misc_feature 1..33: note = Elongator complex protein 1 (1171-1181)
  source 1..33: mol_type = other RNA
agcgtggtctccggctctgagatgtcagggaag

SEQ ID NO: 75984 - RNA, 33 nt, synthetic construct
  misc_feature 1..33: note = DNA dC-dU-editing enzyme APOBEC-3C (46-56)
  source 1..33: mol_type = other RNA
agcgtggtctcctggaagaccggcgttttcaga

SEQ ID NO: 75985 - RNA, 27 nt, synthetic construct
  misc_feature 1..27: note = Centrosomal protein of 131 kDa (47-55)
  source 1..27: mol_type = other RNA
agcgtggtcaccggctccgagcagaag

SEQ ID NO: 75986 - RNA, 27 nt, synthetic construct
  misc_feature 1..27: note = Discoidin domain-containing receptor 2 (215-223)
  source 1..27: mol_type = other RNA
agcgtgtacgacggcgccgtcgggtat

SEQ ID NO: 75987 - RNA, 30 nt, synthetic construct
  misc_feature 1..30: note = Exocyst complex component 6B (39-48)
  source 1..30: mol_type = other RNA
agcgtgtacgacggcgaggaacacgggaga

SEQ ID NO: 75988 - RNA, 39 nt, synthetic construct
  misc_feature 1..39: note = Serum paraoxonase/arylesterase 2 (334-346)
  source 1..39: mol_type = other RNA
agcgtgtacgacggcaagctgctcatcgggaccctttat

SEQ ID NO: 75989 - RNA, 30 nt, synthetic construct
  misc_feature 1..30: note = DNA-binding protein RFX7 (1307-1316)
  source 1..30: mol_type = other RNA
agcgtgtacgagttccagaccccctcctat

SEQ ID NO: 75990 - RNA, 30 nt, synthetic construct
  misc_feature 1..30: note = Far upstream element-binding protein 3 (77-86)
  source 1..30: mol_type = other RNA
agcgtgtacggctatggggtccagaagaga

SEQ ID NO: 75991 - RNA, 33 nt, synthetic construct
  misc_feature 1..33: note = Nuclear cap-binding protein subunit 1 (280-290)
  source 1..33: mol_type = other RNA
agcgtgtaccccatgcctagagtcatcttcagg

SEQ ID NO: 75992 - RNA, 33 nt, synthetic construct
  misc_feature 1..33: note = Inositol hexakisphosphate and diphosphoinositol-pentakisphosphate kinase 2 (220-230)
  source 1..33: mol_type = other RNA
agcgtgtactcccccgagtctaacgtcagaaag

SEQ ID NO: 75993 - RNA, 30 nt, synthetic construct
  misc_feature 1..30: note = Golgi resident protein GCP60 (519-528)
  source 1..30: mol_type = other RNA
agcgtgtactatagagtctactataccagg

SEQ ID NO: 75994 - RNA, 27 nt, synthetic construct
  misc_feature 1..27: note = T-box transcription factor TBX2 (536-544)
  source 1..27: mol_type = other RNA
accgccgctcccttcccttttcacctg

SEQ ID NO: 75995 - RNA, 33 nt, synthetic construct
  misc_feature 1..33: note = Transducin beta-like protein 3 (197-207)
  source 1..33: mol_type = other RNA
accgccgaccacaacctgctcctttacgaggct

SEQ ID NO: 75996 - RNA, 27 nt, synthetic construct
  misc_feature 1..27: note = Protein bicaudal D homolog 2 (465-473)
  source 1..27: mol_type = other RNA
accgccgaggtggctctggcaaacctc

SEQ ID NO: 75997 - RNA, 27 nt, synthetic construct
  misc_feature 1..27: note = Unconventional myosin-X (353-361)
  source 1..27: mol_type = other RNA
accgccctgggcagaagcgctgagctc

SEQ ID NO: 75998 - RNA, 27 nt, synthetic construct
  misc_feature 1..27: note = Homeodomain-interacting protein kinase 3 (308-316)
  source 1..27: mol_type = other RNA
accgccctgaagaaactcaagagcctt

SEQ ID NO: 75999 - RNA, 27 nt, synthetic construct
  misc_feature 1..27: note = Protein S100-A1 (7-15)
  source 1..27: mol_type = other RNA
accgccatggagacactgatcaacgtg

SEQ ID NO: 76000 - RNA, 33 nt, synthetic construct
  misc_feature 1..33: note = Ankycorbin (72-82)
  source 1..33: mol_type = other RNA
accgcccaggacacaactggccacagcgctctg

SEQ ID NO: 76001 - RNA, 48 nt, synthetic construct
  misc_feature 1..48: note = Presequence protease, mitochondrial (707-722)
  source 1..48: mol_type = other RNA
accgcccaggagctggctaacggcatccccgacagcgggcacctctac

SEQ ID NO: 76002 - RNA, 21 nt, synthetic construct
  misc_feature 1..21: note = Nuclear pore complex-interacting protein (238-244)
  source 1..21: mol_type = other RNA
accgacaacagcctgtccctc

SEQ ID NO: 76003 - RNA, 30 nt, synthetic construct
  misc_feature 1..30: note = Interleukin-1 receptor accessory protein (307-316)
  source 1..30: mol_type = other RNA
accgaggacgaaacaagaactcagatcctg

SEQ ID NO: 76004 - RNA, 30 nt, synthetic construct
  misc_feature 1..30: note = Uncharacterized membrane protein C19orf24 (108-117)
  source 1..30: mol_type = other RNA
accgaggaccccacagaaatggccagcctg

SEQ ID NO: 76005 - RNA, 27 nt, synthetic construct
  misc_feature 1..27: note = Quinone oxidoreductase (182-190)
  source 1..27: mol_type = other RNA
accgaggaaggccagaagatcgtgctg

SEQ ID NO: 76006 - RNA, 30 nt, synthetic construct
  misc_feature 1..30: note = Proteasome activator complex subunit 3 (220-229)
  source 1..30: mol_type = other RNA
accgagatcgacgaaaaggagtacattagc

SEQ ID NO: 76007 - RNA, 27 nt, synthetic construct
  misc_feature 1..27: note = Ventricular zone-expressed PH domain-containing protein homolog 1 (7-15)
  source 1..27: mol_type = other RNA
accgagatcgaattccccgagaagctg

SEQ ID NO: 76008 - RNA, 27 nt, synthetic construct
  misc_feature 1..27: note = RNA-binding protein 12 (77-85)
  source 1..27: mol_type = other RNA
accgagatgcagaacatgatcgaactg

SEQ ID NO: 76009 - RNA, 27 nt, synthetic construct
  misc_feature 1..27: note = Pre-mRNA-processing-splicing factor 8 (945-953)
  source 1..27: mol_type = other RNA
accgagccccctccactgctcgtgtac

SEQ ID NO: 76010 - RNA, 27 nt, synthetic construct
  misc_feature 1..27: note = Probable N-acetyltransferase 16 (59-67)
  source 1..27: mol_type = other RNA
accgagagagaattcgaggaagtgctg

SEQ ID NO: 76011 - RNA, 27 nt, synthetic construct
  misc_feature 1..27: note = Major facilitator superfamily domain-containing protein 1 (327-335)
  source 1..27: mol_type = other RNA
accggcaagaacatcatttgggtgctg

SEQ ID NO: 76012 - RNA, 27 nt, synthetic construct
  misc_feature 1..27: note = DNA topoisomerase 2-alpha (1397-1405)
  source 1..27: mol_type = other RNA
acccacttccccgacgagacagaaatc

SEQ ID NO: 76013 - RNA, 30 nt, synthetic construct
  misc_feature 1..30: note = Mothers against decapentaplegic homolog 2 (197-206)
  source 1..30: mol_type = other RNA
acccacagcatccccgagaacacaaatttc

SEQ ID NO: 76014 - RNA, 30 nt, synthetic construct
  misc_feature 1..30: note = Sorting nexin-18 (279-288)
  source 1..30: mol_type = other RNA
accatcgacgatcccacaaagcagactaaa

SEQ ID NO: 76015 - RNA, 33 nt, synthetic construct
  misc_feature 1..33: note = Plastin-2 (117-127)
  source 1..33: mol_type = other RNA
accatcgacgagagaacaattaacaagaaaaag

SEQ ID NO: 76016 - RNA, 27 nt, synthetic construct
  misc_feature 1..27: note = MAM and LDL-receptor class A domain-containing protein 1 (1829-1837)
  source 1..27: mol_type = other RNA
accatcgaggaaagcggcctgaacatt

SEQ ID NO: 76017 - RNA, 30 nt, synthetic construct
  misc_feature 1..30: note = NADH-ubiquinone oxidoreductase chain 2 (12-21)
  source 1..30: mol_type = other RNA
accatcttcgccggcacactgattactgct

SEQ ID NO: 76018 - RNA, 27 nt, synthetic construct
  misc_feature 1..27: note = DBH-like monooxygenase protein 1 (50-58)
  source 1..27: mol_type = other RNA
accatcattgagttcacaagagaactg

SEQ ID NO: 76019 - RNA, 27 nt, synthetic construct
  misc_feature 1..27: note = Cytoskeleton-associated protein 5 (365-373)
  source 1..27: mol_type = other RNA
accatcctggagaagttcaaagaaaag

SEQ ID NO: 76020 - RNA, 48 nt, synthetic construct
  misc_feature 1..48: note = Melanocyte protein PMEL (215-230)
  source 1..48: mol_type = other RNA
accatcacagaccaggtgcccttcagcgtctccgtttctcaactgaga

SEQ ID NO: 76021 - RNA, 39 nt, synthetic construct
  misc_feature 1..39: note = Ornithine aminotransferase, mitochondrial (30-42)
  source 1..39: mol_type = other RNA
accaagaaaacagtgcagggcccccctactagcgacgat

SEQ ID NO: 76022 - RNA, 39 nt, synthetic construct
  misc_feature 1..39: note = Catenin delta-1 (790-802)
  source 1..39: mol_type = other RNA
accaagagcctggacaacaattactccacacccaacgag

SEQ ID NO: 76023 - RNA, 30 nt, synthetic construct
  misc_feature 1..30: note = Low-density lipoprotein receptor-related protein 1B (701-710)
  source 1..30: mol_type = other RNA
accctggacttccacacaaacactctctac

SEQ ID NO: 76024 - RNA, 33 nt, synthetic construct
  misc_feature 1..33: note = KN motif and ankyrin repeat domain-containing protein 1 (702-712)
  source 1..33: mol_type = other RNA
accctggacaagcagacaagcactcaaacggtg

SEQ ID NO: 76025 - RNA, 24 nt, synthetic construct
  misc_feature 1..24: note = PH and SEC7 domain-containing protein 3 (117-124)
  source 1..24: mol_type = other RNA
accctggaccagagcctcagatac

SEQ ID NO: 76026 - RNA, 27 nt, synthetic construct
  misc_feature 1..27: note = Kinesin-like protein KIF20B (1134-1142)
  source 1..27: mol_type = other RNA
accctggacgtgcagatccaacacgtc

SEQ ID NO: 76027 - RNA, 33 nt, synthetic construct
  misc_feature 1..33: note = UPF0505 protein C16orf62 (625-635)
  source 1..33: mol_type = other RNA
accctggaggacgaaaagagaatgctcagctac

SEQ ID NO: 76028 - RNA, 33 nt, synthetic construct
  misc_feature 1..33: note = Syndecan-3 (348-358)
  source 1..33: mol_type = other RNA
accctggaggaacccaagcaggccagcgtgaca

SEQ ID NO: 76029 - RNA, 30 nt, synthetic construct
  misc_feature 1..30: note = Biliverdin reductase A (71-80)
  source 1..30: mol_type = other RNA
accctggaggaaagaaaggaggaccagtac

SEQ ID NO: 76030 - RNA, 27 nt, synthetic construct
  misc_feature 1..27: note = Rap guanine nucleotide exchange factor 6 (4-12)
  source 1..27: mol_type = other RNA
accctgttccagaagctctttagcaaa

SEQ ID NO: 76031 - RNA, 30 nt, synthetic construct
  misc_feature 1..30: note = ATP-dependent RNA helicase DHX36 (503-512)
  source 1..30: mol_type = other RNA
accctgcacgacctccttatgagccaggtg

SEQ ID NO: 76032 - RNA, 30 nt, synthetic construct
  misc_feature 1..30: note = F-box/WD repeat-containing protein 11 (217-226)
  source 1..30: mol_type = other RNA
accctgatccaccataacgaggccgtgctc

SEQ ID NO: 76033 - RNA, 30 nt, synthetic construct
  misc_feature 1..30: note = Plexin-C1 (370-379)
  source 1..30: mol_type = other RNA
accctgatccacagcgacctcacatccgtg

SEQ ID NO: 76034 - RNA, 33 nt, synthetic construct
  misc_feature 1..33: note = Tetraspanin-14 (239-249)
  source 1..33: mol_type = other RNA
accctgatcagcgacattgaggccgtgaaggct

SEQ ID NO: 76035 - RNA, 27 nt, synthetic construct
  misc_feature 1..27: note = Midasin (462-470)
  source 1..27: mol_type = other RNA
accctgctcgacaagtactggacaaaa

SEQ ID NO: 76036 - RNA, 33 nt, synthetic construct
  misc_feature 1..33: note = Inositol-tetrakisphosphate 1-kinase (102-112)
  source 1..33: mol_type = other RNA
accctgctcgacagaagcaagtcctacgagctt

SEQ ID NO: 76037 - RNA, 27 nt, synthetic construct
  misc_feature 1..27: note = Midasin (3030-3038)
  source 1..27: mol_type = other RNA
accctgctcgaggtgggccagatcgcc

SEQ ID NO: 76038 - RNA, 36 nt, synthetic construct
  misc_feature 1..36: note = NADH-ubiquinone oxidoreductase chain 4L (39-50)
  source 1..36: mol_type = other RNA
accctgatgacactcaacactcacagccttctggcc

SEQ ID NO: 76039 - RNA, 30 nt, synthetic construct
  misc_feature 1..30: note = Serine/threonine-protein phosphatase 1 regulatory subunit 10 (169-178)
  source 1..30: mol_type = other RNA
accctgcccgagagacctctcacagaagtg

SEQ ID NO: 76040 - RNA, 27 nt, synthetic construct
  misc_feature 1..27: note = Sorting nexin-9 (218-226)
  source 1..27: mol_type = other RNA
accctgcaggacaagcaaaacatggtg

SEQ ID NO: 76041 - RNA, 30 nt, synthetic construct
  misc_feature 1..30: note = Olfactory receptor (79-88)
  source 1..30: mol_type = other RNA
accctggtgggcaacttcacaatcattata

SEQ ID NO: 76042 - RNA, 27 nt, synthetic construct
  misc_feature 1..27: note = tRNA-dihydrouridine(20) synthase (NAD(P)+)-like (378-386)
  source 1..27: mol_type = other RNA
accctgtgggacaagagcaaaaagctc

SEQ ID NO: 76043 - RNA, 33 nt, synthetic construct
  misc_feature 1..33: note = Spatacsin (451-461)
  source 1..33: mol_type = other RNA
accctgtgggacctcgagacacagggcatgcaa

SEQ ID NO: 76044 - RNA, 27 nt, synthetic construct
  misc_feature 1..27: note = E3 SUMO-protein ligase PIAS1 (360-368)
  source 1..27: mol_type = other RNA
accctgtacatccagatgaacgagaag

SEQ ID NO: 76045 - RNA, 42 nt, synthetic construct
  misc_feature 1..42: note = Eukaryotic translation initiation factor 3 subunit D (56-69)
  source 1..42: mol_type = other RNA
accaacaagtacagctcccagttcggcgggggatctcaatat

SEQ ID NO: 76046 - RNA, 33 nt, synthetic construct
  misc_feature 1..33: note = ATP-dependent RNA helicase DDX42 (106-116)
  source 1..33: mol_type = other RNA
accaacctgacaccccagcaactcatcgacctt

SEQ ID NO: 76047 - RNA, 27 nt, synthetic construct
  misc_feature 1..27: note = Calcium permeable stress-gated cation channel 1 (426-434)
  source 1..27: mol_type = other RNA
acccccgccatcattatgaacacaata

SEQ ID NO: 76048 - RNA, 27 nt, synthetic construct
  misc_feature 1..27: note = Neuron navigator 2 (981-989)
  source 1..27: mol_type = other RNA
acccccgccagctccagaaagaacctg

SEQ ID NO: 76049 - RNA, 48 nt, synthetic construct
  misc_feature 1..48: note = Nucleolin (121-136)
  source 1..48: mol_type = other RNA
acccccggcaagaaaggggccgctatccctgcaaagggagccaaaaac

SEQ ID NO: 76050 - RNA, 57 nt, synthetic construct
  misc_feature 1..57: note = Nucleolin (121-139)
  source 1..57: mol_type = other RNA
acccccggcaagaaaggggccgctatccctgcaaagggagccaaaaacggtaagaat

SEQ ID NO: 76051 - RNA, 36 nt, synthetic construct
  misc_feature 1..36: note = Chondroitin sulfate proteoglycan 4 (2310-2321)
  source 1..36: mol_type = other RNA
acccccaaccctgccctgaagaatggccagtactgg

SEQ ID NO: 76052 - RNA, 42 nt, synthetic construct
  misc_feature 1..42: note = Alpha-adducin (194-207)
  source 1..42: mol_type = other RNA
acccccagcttcctgaagaaatccaagaaaaagtctgactca

SEQ ID NO: 76053 - RNA, 27 nt, synthetic construct
  misc_feature 1..27: note = GPI ethanolamine phosphate transferase 3 (274-282)
  source 1..27: mol_type = other RNA
acccaggacctgcaagccaaggagctc

SEQ ID NO: 76054 - RNA, 30 nt, synthetic construct
  misc_feature 1..30: note = Homer protein homolog 3 (100-109)
  source 1..30: mol_type = other RNA
acccagttcgccgagaagtttcaagaagtg

SEQ ID NO: 76055 - RNA, 33 nt, synthetic construct
  misc_feature 1..33: note = Hypoxia-inducible factor 1-alpha (123-133)
  source 1..33: mol_type = other RNA
acccagttcgagctgacaggccacagcgtgttt

SEQ ID NO: 76056 - RNA, 33 nt, synthetic construct
  misc_feature 1..33: note = Serine-protein kinase ATM (2268-2278)
  source 1..33: mol_type = other RNA
acccagctgcccgagagagccatcttccaaatt

SEQ ID NO: 76057 - RNA, 36 nt, synthetic construct
  misc_feature 1..36: note = Proteasome subunit beta type-4 (15-26)
  source 1..36: mol_type = other RNA
acccagaaccccatggtgacaggcactagcgtcctg

SEQ ID NO: 76058 - RNA, 33 nt, synthetic construct
  misc_feature 1..33: note = von Willebrand factor A domain-containing protein 9 (75-85)
  source 1..33: mol_type = other RNA
acccagaaccaaagaagcgagtccaataggttc

SEQ ID NO: 76059 - RNA, 39 nt, synthetic construct
  misc_feature 1..39: note = Macrophage migration inhibitory factor (22-34)
  source 1..39: mol_type = other RNA
acccagcaactggcccaggctacaggcaagccccctcag

SEQ ID NO: 76060 - RNA, 27 nt, synthetic construct
  misc_feature 1..27: note = Gamma-interferon-inducible protein 16 (235-243)
  source 1..27: mol_type = other RNA
acccagacacaattctttcacgtgaag

SEQ ID NO: 76061 - RNA, 27 nt, synthetic construct
  misc_feature 1..27: note = 60S ribosomal protein L14 (89-97)
  source 1..27: mol_type = other RNA
accagatgggccaagaaaatcgaggct

SEQ ID NO: 76062 - RNA, 27 nt, synthetic construct
  misc_feature 1..27: note = Cadherin-19 (219-227)
  source 1..27: mol_type = other RNA
accagcgccgagatcagatccctgtac

SEQ ID NO: 76063 - RNA, 30 nt, synthetic construct
  misc_feature 1..30: note = WW domain-containing adapter protein with coiled-coil (338-347)
  source 1..30: mol_type = other RNA
accagcgacgcctcctctcccagatcatac

SEQ ID NO: 76064 - RNA, 27 nt, synthetic construct
  misc_feature 1..27: note = FAST kinase domain-containing protein 2 (547-555)
  source 1..27: mol_type = other RNA
accagcgacgatatgaagaacgcctac

SEQ ID NO: 76065 - RNA, 30 nt, synthetic construct
  misc_feature 1..30: note = Latent-transforming growth factor beta-binding protein 2 (1043-1052)
  source 1..30: mol_type = other RNA
accagcgacgagaagggctgccaggatgtg

SEQ ID NO: 76066 - RNA, 33 nt, synthetic construct
  misc_feature 1..33: note = Trimethyllysine dioxygenase, mitochondrial (224-234)
  source 1..33: mol_type = other RNA
accagcgacttctccagaggcgatacagcctac

SEQ ID NO: 76067 - RNA, 33 nt, synthetic construct
  misc_feature 1..33: note = Cyclic AMP-dependent transcription factor ATF-6 alpha (429-439)
  source 1..33: mol_type = other RNA
accagcgacggcatcattcagaagaactcctac

SEQ ID NO: 76068 - RNA, 27 nt, synthetic construct
  misc_feature 1..27: note = L-dopachrome tautomerase (136-144)
  source 1..27: mol_type = other RNA
accagcgaccagctgggctactcctat

SEQ ID NO: 76069 - RNA, 27 nt, synthetic construct
  misc_feature 1..27: note = Poly (ADP-ribose) polymerase 11 (22-30)
  source 1..27: mol_type = other RNA
accagcgacacacagtggggctggttc

SEQ ID NO: 76070 - RNA, 33 nt, synthetic construct
  misc_feature 1..33: note = Endoplasmin (188-198)
  source 1..33: mol_type = other RNA
accagcgagctgatcggccagttcggggtggga

SEQ ID NO: 76071 - RNA, 36 nt, synthetic construct
  misc_feature 1..36: note = Probable ATP-dependent RNA helicase DDX5 (556-567)
  source 1..36: mol_type = other RNA
accagcttcagaacaggcaaccccactgggacgtac

SEQ ID NO: 76072 - RNA, 30 nt, synthetic construct
  misc_feature 1..30: note = YTH domain-containing family protein 2 (706-715)
  source 1..30: mol_type = other RNA
accagcatcttcgacgatttttcccactac

SEQ ID NO: 76073 - RNA, 27 nt, synthetic construct
  misc_feature 1..27: note = KN motif and ankyrin repeat domain-containing protein 4 (11-19)
  source 1..27: mol_type = other RNA
accagcctgaagtccatcatgaaaaag

SEQ ID NO: 76074 - RNA, 33 nt, synthetic construct
  misc_feature 1..33: note = E3 ubiquitin-protein ligase RNF213 (1201-1211)
  source 1..33: mol_type = other RNA
accagctccaactctcagagagccacacactac

SEQ ID NO: 76075 - RNA, 51 nt, synthetic construct
  misc_feature 1..51: note = Nestin (511-527)
  source 1..51: mol_type = other RNA
accagctgggccggcgctcccgtgcacctggggcagggacaattcctcaag

SEQ ID NO: 76076 - RNA, 27 nt, synthetic construct
  misc_feature 1..27: note = Probable ATP-dependent RNA helicase YTHDC2 (1212-1220)
  source 1..27: mol_type = other RNA
accacagccgagagagtgctgatgaag

SEQ ID NO: 76077 - RNA, 24 nt, synthetic construct
  misc_feature 1..24: note = Junction plakoglobin (287-294)
  source 1..24: mol_type = other RNA
accacagactgcctgcagctcctt

SEQ ID NO: 76078 - RNA, 27 nt, synthetic construct
  misc_feature 1..27: note = Junction plakoglobin (287-295)
  source 1..27: mol_type = other RNA
accacagactgcctgcagctccttgcc

SEQ ID NO: 76079 - RNA, 33 nt, synthetic construct
  misc_feature 1..33: note = Flavin reductaseADPH) (190-200)
  source 1..33: mol_type = other RNA
accacagacgagtacgatggccacagcacttat

SEQ ID NO: 76080 - RNA, 27 nt, synthetic construct
  misc_feature 1..27: note = ATP-dependent 6-phosphofructokinase, platelet type (379-387)
  source 1..27: mol_type = other RNA
accacagacttcatctaccagctgtat

SEQ ID NO: 76081 - RNA, 24 nt, synthetic construct
  misc_feature 1..24: note = Probable ATP-dependent RNA helicase DDX60-like (990-997)
  source 1..24: mol_type = other RNA
accacagacatcattgagaagtac

SEQ ID NO: 76082 - RNA, 33 nt, synthetic construct
  misc_feature 1..33: note = Methyl-CpG-binding domain protein 6 (678-688)
  source 1..33: mol_type = other RNA
accacagaccccggcgccagctccctggggaag

SEQ ID NO: 76083 - RNA, 30 nt, synthetic construct
  misc_feature 1..30: note = IQ domain-containing protein G (71-80)
  source 1..30: mol_type = other RNA
accacagaccagctgagcatcctcaactac

SEQ ID NO: 76084 - RNA, 27 nt, synthetic construct
  misc_feature 1..27: note = Glutamate receptor ionotropic, kainate 5 (78-86)
  source 1..27: mol_type = other RNA
accacagacactatgtgccagatcctg

SEQ ID NO: 76085 - RNA, 27 nt, synthetic construct
  misc_feature 1..27: note = Heterogeneous nuclear ribonucleoproteins A2/B1 (20-28)
  source 1..27: mol_type = other RNA
accacagaggaaagcctgagaaactac

SEQ ID NO: 76086 - RNA, 27 nt, synthetic construct
  misc_feature 1..27: note = Apoptosis-stimulating of p53 protein 1 (687-695)
  source 1..27: mol_type = other RNA
accacagagcagatccccagccctgtg

SEQ ID NO: 76087 - RNA, 39 nt, synthetic construct
  misc_feature 1..39: note = Transformer-2 protein homolog beta (29-41)
  source 1..39: mol_type = other RNA
accacagagagagacctgagggaagtgttcagcaagtac

SEQ ID NO: 76088 - RNA, 27 nt, synthetic construct
  misc_feature 1..27: note = Pre-mRNA-processing-splicing factor 8 (1254-1262)
  source 1..27: mol_type = other RNA
accacattcactaagatcgtgaacaaa

SEQ ID NO: 76089 - RNA, 33 nt, synthetic construct
  misc_feature 1..33: note = Suppressor of tumorigenicity 7 protein (228-238)
  source 1..33: mol_type = other RNA
accacaatcgccgaggctgaaaagctgttcaaa

SEQ ID NO: 76090 - RNA, 27 nt, synthetic construct
  misc_feature 1..27: note = Lysine-specific demethylase 6B (1272-1280)
  source 1..27: mol_type = other RNA
accacaatcgccaagtacgctcagtat

SEQ ID NO: 76091 - RNA, 36 nt, synthetic construct
  misc_feature 1..36: note = TOX high mobility group box family member 4 (142-153)
  source 1..36: mol_type = other RNA
accacaatcgaccagagcgagctgtcctctcaactc

SEQ ID NO: 76092 - RNA, 33 nt, synthetic construct
  misc_feature 1..33: note = Nucleolar protein 10 (56-66)
  source 1..33: mol_type = other RNA
accacaatcaaggtgagcaaagacggccagtac

SEQ ID NO: 76093 - RNA, 39 nt, synthetic construct
  misc_feature 1..39: note = V-type proton ATPase subunit F (43-55)
  source 1..39: mol_type = other RNA
accacaatcaacgagattgaagacactttcagacagttt

SEQ ID NO: 76094 - RNA, 30 nt, synthetic construct
  misc_feature 1..30: note = Large neutral amino acids transporter small subunit 1 (108-117)
  source 1..30: mol_type = other RNA
accacaatcagcaagtccggcggggactac

SEQ ID NO: 76095 - RNA, 27 nt, synthetic construct
  misc_feature 1..27: note = WD repeat-containing protein 3 (883-891)
  source 1..27: mol_type = other RNA
accacaatcagcaaggtgtcccaggtc

SEQ ID NO: 76096 - RNA, 27 nt, synthetic construct
  misc_feature 1..27: note = Succinyl-CoA ligase (ADP/GDP-forming) subunit alpha, mitochondrial (321-329)
  source 1..27: mol_type = other RNA
accacaatctacaaggagttcgaaaaa

SEQ ID NO: 76097 - RNA, 27 nt, synthetic construct
  misc_feature 1..27: note = Neurofilament light polypeptide (267-275)
  source 1..27: mol_type = other RNA
accacaaagagcgagatggccagatac

SEQ ID NO: 76098 - RNA, 30 nt, synthetic construct
  misc_feature 1..30: note = Melanoma-associated antigen D1 (152-161)
  source 1..30: mol_type = other RNA
accacaaaggtgggccccaacgccacttac

SEQ ID NO: 76099 - RNA, 33 nt, synthetic construct
  misc_feature 1..33: note = Glycosylphosphatidylinositol anchor attachment 1 protein (526-536)
  source 1..33: mol_type = other RNA
accacaatggtgcccactgccgctctggcaaag

SEQ ID NO: 76100 - RNA, 27 nt, synthetic construct
  misc_feature 1..27: note = Urocortin-2 (100-108)
  source 1..27: mol_type = other RNA
accacaaacgccagaatcctggctagg

SEQ ID NO: 76101 - RNA, 27 nt, synthetic construct
  misc_feature 1..27: note = Reticulon-1 (204-212)
  source 1..27: mol_type = other RNA
accacacccgtgaagatcactctgacg

SEQ ID NO: 76102 - RNA, 33 nt, synthetic construct
  misc_feature 1..33: note = Probable E3 ubiquitin-protein ligase HERC1 (3302-3312)
  source 1..33: mol_type = other RNA
accacagtggacgatagcatccagagaaagttc

SEQ ID NO: 76103 - RNA, 36 nt, synthetic construct
  misc_feature 1..36: note = Ubiquitin carboxyl-terminal hydrolase 19 (1362-1373)
  source 1..36: mol_type = other RNA
accacagtggacgagagccaggtcgttactagatac

SEQ ID NO: 76104 - RNA, 30 nt, synthetic construct
  misc_feature 1..30: note = 40S ribosomal protein S6 (125-134)
  source 1..30: mol_type = other RNA
accacagtgcccagaaggctgggccctaag

SEQ ID NO: 76105 - RNA, 27 nt, synthetic construct
  misc_feature 1..27: note = Aminoacyl tRNA synthase complex-interacting multifunctional protein 2 (206-214)
  source 1..27: mol_type = other RNA
accgtggccgacgtcgttctgtggagc

SEQ ID NO: 76106 - RNA, 30 nt, synthetic construct
  misc_feature 1..30: note = Aminoacyl tRNA synthase complex-interacting multifunctional protein 2 (206-215)
  source 1..30: mol_type = other RNA
accgtggccgacgtcgttctgtggagcgtg

SEQ ID NO: 76107 - RNA, 30 nt, synthetic construct; identical to SEQ ID NO: 51880
  misc_feature 1..30: note = Protein FAM73B (18-27)
  source 1..30: mol_type = other RNA

SEQ ID NO: 76108 - RNA, 30 nt, synthetic construct
  misc_feature 1..30: note = Carboxypeptidase Q (271-280)
  source 1..30: mol_type = other RNA
accgtggccgagatcacaggcagcaagtac

SEQ ID NO: 76109 - RNA, 27 nt, synthetic construct
  misc_feature 1..27: note = Dynein heavy chain 14, axonemal (3163-3171)
  source 1..27: mol_type = other RNA
accgtggccgagaagcagctgctcgct

SEQ ID NO: 76110 - RNA, 27 nt, synthetic construct
  misc_feature 1..27: note = Protein phosphatase 1K, mitochondrial (191-199)
  source 1..27: mol_type = other RNA
accgtggccctgctcagagacggcatc

SEQ ID NO: 76111 - RNA, 27 nt, synthetic construct
  misc_feature 1..27: note = Abl interactor 2 (96-104)
  source 1..27: mol_type = other RNA
accgtggacatccacaaggagaaagtc

SEQ ID NO: 76112 - RNA, 27 nt, synthetic construct
  misc_feature 1..27: note = Volume-regulated anion channel subunit LRRC8B (622-630)
  source 1..27: mol_type = other RNA
accgtggaggaaatcattagcttccag

SEQ ID NO: 76113 - RNA, 33 nt, synthetic construct
  misc_feature 1..33: note = Vimentin (446-456)
  source 1..33: mol_type = other RNA
accgtggagacaagagacggccaggtcatcaac

SEQ ID NO: 76114 - RNA, 27 nt, synthetic construct
  misc_feature 1..27: note = Olfactory receptor 51G2 (211-219)
  source 1..27: mol_type = other RNA
accgtgggcatcgacagcctgctcatt

SEQ ID NO: 76115 - RNA, 36 nt, synthetic construct
  misc_feature 1..36: note = Exocyst complex component 7 (401-412)
  source 1..36: mol_type = other RNA
accgtgcacgagctgacaagcaacgccatcctcttc

SEQ ID NO: 76116 - RNA, 27 nt, synthetic construct
  misc_feature 1..27: note = WD repeat-containing protein 70 (364-372)
  source 1..27: mol_type = other RNA
accgtgcaccccaagttccattacaaa

SEQ ID NO: 76117 - RNA, 27 nt, synthetic construct
  misc_feature 1..27: note = Eukaryotic translation initiation factor 3 subunit C-like protein (818-826)
  source 1..27: mol_type = other RNA
accgtgcacagcatcatttccaagatg

SEQ ID NO: 76118 - RNA, 30 nt, synthetic construct
  misc_feature 1..30: note = Transmembrane emp24 domain-containing protein 3 (153-162)
  source 1..30: mol_type = other RNA
accgtgatcgacagccagacacactacaga

SEQ ID NO: 76119 - RNA, 30 nt, synthetic construct
  misc_feature 1..30: note = 60S ribosomal protein L7-like 1 (171-180)
  source 1..30: mol_type = other RNA
accgtgatcgaggaacacctgggcaagttc

SEQ ID NO: 76120 - RNA, 27 nt, synthetic construct
  misc_feature 1..27: note = Ubiquitin carboxyl-terminal hydrolase 24 (488-496)
  source 1..27: mol_type = other RNA
accgtgatcgagaacattcacacaata

SEQ ID NO: 76121 - RNA, 27 nt, synthetic construct
  misc_feature 1..27: note = Integrin alpha-2 (988-996)
  source 1..27: mol_type = other RNA
accgtgatcattcacataccccagtac

SEQ ID NO: 76122 - RNA, 33 nt, synthetic construct
  misc_feature 1..33: note = Actin filament-associated protein 1-like 1 (208-218)
  source 1..33: mol_type = other RNA
accgtgatcagagaggaccagctgctctgctac

SEQ ID NO: 76123 - RNA, 33 nt, synthetic construct
  misc_feature 1..33: note = Angiomotin (709-719)
  source 1..33: mol_type = other RNA
accgtgatcagccactcccccaacacatcttac

SEQ ID NO: 76124 - RNA, 39 nt, synthetic construct
  misc_feature 1..39: note = Interferon-induced protein 44 (52-64)
  source 1..39: mol_type = other RNA
accgtgatctacagcgaggaccacattataggcgcctat

SEQ ID NO: 76125 - RNA, 27 nt, synthetic construct
  misc_feature 1..27: note = Structural maintenance of chromosomes flexible hinge domain-containing protein 1 (90-98)
  source 1..27: mol_type = other RNA
accgtgaaggacggcgtcacactgtac

SEQ ID NO: 76126 - RNA, 27 nt, synthetic construct
  misc_feature 1..27: note = Microtubule-actin cross-linking factor 1 isoform X31 (4329-4337)
  source 1..27: mol_type = other RNA
accgtgaaggaccagctgaacgagatg

SEQ ID NO: 76127 - RNA, 27 nt, synthetic construct
  misc_feature 1..27: note = DnaJ homolog subfamily B member 1 (332-340)
  source 1..27: mol_type = other RNA
accgtgctggagcaggtcctccccatc

SEQ ID NO: 76128 - RNA, 27 nt, synthetic construct
  misc_feature 1..27: note = Prostaglandin E2 receptor EP4 subtype (335-343)
  source 1..27: mol_type = other RNA
accgtgctgagcaaggccatcgagaaa

SEQ ID NO: 76129 - RNA, 30 nt, synthetic construct; identical to SEQ ID NO: 51902
  misc_feature 1..30: note = Carboxypeptidase Q (441-450)
  source 1..30: mol_type = other RNA

SEQ ID NO: 76130 - RNA, 27 nt, synthetic construct
  misc_feature 1..27: note = Embryonic stem cell-specific 5-hydroxymethylcytosine-binding protein (101-109)
  source 1..27: mol_type = other RNA
accgtgatggagaagagaagcttcaaa

SEQ ID NO: 76131 - RNA, 36 nt, synthetic construct
  misc_feature 1..36: note = MICOS complex subunit MIC13 (90-101)
  source 1..36: mol_type = other RNA
accgtgatgagcgccctgtccgtcgctccctctaag

SEQ ID NO: 76132 - RNA, 27 nt, synthetic construct
  misc_feature 1..27: note = Zinc finger protein 3 (182-190)
  source 1..27: mol_type = other RNA
accgtgaacagcaatctgatctcccac

SEQ ID NO: 76133 - RNA, 27 nt, synthetic construct
  misc_feature 1..27: note = Mucin-3A isoform (865-873)
  source 1..27: mol_type = other RNA
accgtgcagaacacagagatcagcatt

SEQ ID NO: 76134 - RNA, 33 nt, synthetic construct
  misc_feature 1..33: note = Zinc finger BED domain-containing protein 4 (806-816)
  source 1..33: mol_type = other RNA
accgtgacagacaacgccagcatcggcaagact

SEQ ID NO: 76135 - RNA, 36 nt, synthetic construct
  misc_feature 1..36: note = Transmembrane protein 186 (82-93)
  source 1..36: mol_type = other RNA
accgtggtcgccctgccccctggctactatctctac

SEQ ID NO: 76136 - RNA, 27 nt, synthetic construct
  misc_feature 1..27: note = RNA-binding protein Musashi homolog 2 (17-25)
  source 1..27: mol_type = other RNA
accgtggtcgaggacgttaagcagtac

SEQ ID NO: 76137 - RNA, 36 nt, synthetic construct
  misc_feature 1..36: note = Serine/threonine-protein kinase A-Raf (31-42)
  source 1..36: mol_type = other RNA
accgtggtcacagttagagacggcatgagcgtgtac

SEQ ID NO: 76138 - RNA, 27 nt, synthetic construct
  misc_feature 1..27: note = Putative oxidoreductase GLYR1 (235-243)
  source 1..27: mol_type = other RNA
accgtgtggaacagaacagccgagaag

SEQ ID NO: 76139 - RNA, 39 nt, synthetic construct
  misc_feature 1..39: note = RNA-binding protein 26 (673-685)
  source 1..39: mol_type = other RNA
accgtgtacaaccccgccgctctgaaggcagcccagaaa

SEQ ID NO: 76140 - RNA, 33 nt, synthetic construct; identical to SEQ ID NO: 51913
  misc_feature 1..33: note = Junction plakoglobin (21-31)
  source 1..33: mol_type = other RNA

SEQ ID NO: 76141 - RNA, 48 nt, synthetic construct
  misc_feature 1..48: note = Caprin-1 (572-587)
  source 1..48: mol_type = other RNA
acctaccacggcagccccgaccagtcccatcaagtgacagggaaccac

SEQ ID NO: 76142 - RNA, 27 nt, synthetic construct
  misc_feature 1..27: note = Spartin (153-161)
  source 1..27: mol_type = other RNA
gtggccgctcccgcaagcctgtccctc

SEQ ID NO: 76143 - RNA, 30 nt, synthetic construct
  misc_feature 1..30: note = Phosphatidylinositol 3,4,5-trisphosphate 5-phosphatase 2 (908-917)
  source 1..30: mol_type = other RNA
gtggccgctccccctccaaagaacagcttc

SEQ ID NO: 76144 - RNA, 30 nt, synthetic construct
  misc_feature 1..30: note Dolichyl-diphosphooligosaccharide-proteinosyltransferase subunit 2 (450-459)
  source 1..30: mol_type = other RNA
gtggccgagcccgacaacaagaatgtctac

SEQ ID NO: 76145 - RNA, 33 nt, synthetic construct
  misc_feature 1..33: note = Sodium/iodide cotransporter (484-494)
  source 1..33: mol_type = other RNA
gtggccctgagcgtcaacgcttccggcctcctt

SEQ ID NO: 76146 - RNA, 27 nt, synthetic construct
  misc_feature 1..27: note = Transcription elongation factor SPT5 (216-224)
  source 1..27: mol_type = other RNA
gtggcccccgagcacgtcaagggctac

SEQ ID NO: 76147 - RNA, 30 nt, synthetic construct
  misc_feature 1..30: note = DNA-dependent protein kinase catalytic subunit (2797-2806)
  source 1..30: mol_type = other RNA
gtggcccagagagaccccatcattgctaag

SEQ ID NO: 76148 - RNA, 27 nt, synthetic construct
  misc_feature 1..27: note = Tetratricopeptide repeat protein 21B (25-33)
  source 1..27: mol_type = other RNA
gtggccagcgagggcatcaagagatac

SEQ ID NO: 76149 - RNA, 27 nt, synthetic construct
  misc_feature 1..27: note = Probable E3 ubiquitin-protein ligase HERC1 (1139-1147)
  source 1..27: mol_type = other RNA
gtggacctggagagaaccatcgccctc

SEQ ID NO: 76150 - RNA, 27 nt, synthetic construct
  misc_feature 1..27: note = Cytoplasmic dynein 1 heavy chain 1 (795-803)
  source 1..27: mol_type = other RNA
gtggaggaaagaaacaccatcagcctg

SEQ ID NO: 76151 - RNA, 33 nt, synthetic construct
  misc_feature 1..33: note = L-dopachrome tautomerase (152-162)
  source 1..33: mol_type = other RNA
gtggaggaaacccccggctggcctacaactctg

SEQ ID NO: 76152 - RNA, 27 nt, synthetic construct
  misc_feature 1..27: note = Glycogen phosphorylase, brain form (505-513)
  source 1..27: mol_type = other RNA
gtggagaagatcggcgaagagttcctg

SEQ ID NO: 76153 - RNA, 33 nt, synthetic construct
  misc_feature 1..33: note = Receptor-type tyrosine-protein phosphatase delta (635-645)
  source 1..33: mol_type = other RNA
gtggagaagcagaacggcatcattaccgaatac

SEQ ID NO: 76154 - RNA, 24 nt, synthetic construct
  misc_feature 1..24: note = Phosphatidylinositol 3,4,5-trisphosphate-dependent Rac exchanger 1 protein (160-167)
  source 1..24: mol_type = other RNA
gtggagctgaacaagatccccacc

SEQ ID NO: 76155 - RNA, 27 nt, synthetic construct
  misc_feature 1..27: note = Prosaposin (299-307)
  source 1..27: mol_type = other RNA
gtggagcccatcaagaaacacgaagtc

SEQ ID NO: 76156 - RNA, 30 nt, synthetic construct
  misc_feature 1..30: note = Coiled-coil domain-containing protein 13 (514-523)
  source 1..30: mol_type = other RNA
gtggagagcgccctgaccagaccctccctc

SEQ ID NO: 76157 - RNA, 36 nt, synthetic construct
  misc_feature 1..36: note = Protein ZGRF1 (799-810)
  source 1..36: mol_type = other RNA
gtggaggtcgaaaccgccagagagggcaagcagtac

SEQ ID NO: 76158 - RNA, 33 nt, synthetic construct
  misc_feature 1..33: note = Proteasome subunit alpha type-1 (104-114)
  source 1..33: mol_type = other RNA
gtgttcgacagacccctgcctgtcagcaggctc

SEQ ID NO: 76159 - RNA, 33 nt, synthetic construct
  misc_feature 1..33: note = ATP-dependent RNA helicase DDX3X (408-418)
  source 1..33: mol_type = other RNA
gtgggcagcacctccgagaacatcacacagaag

SEQ ID NO: 76160 - RNA, 27 nt, synthetic construct
  misc_feature 1..27: note = Protocadherin-18 (261-269)
  source 1..27: mol_type = other RNA
gtgggcaccctgctccttgacctgaac

SEQ ID NO: 76161 - RNA, 30 nt, synthetic construct
  misc_feature 1..30: note = THO complex subunit 4 (113-122)
  source 1..30: mol_type = other RNA
gtgcactacgacagaagcggcaggtccctg

SEQ ID NO: 76162 - RNA, 36 nt, synthetic construct
  misc_feature 1..36: note = Butyrophilin subfamily 3 member A3 secreted isoform (174-185)
  source 1..36: mol_type = other RNA
gtgatcctggaccccgataccgccaacgctattctc

SEQ ID NO: 76163 - RNA, 21 nt, synthetic construct
  misc_feature 1..21: note = Trafficking protein particle complex subunit 8 (106-112)
  source 1..21: mol_type = other RNA
gtgatcaccgccggcgactac

SEQ ID NO: 76164 - RNA, 30 nt, synthetic construct
  misc_feature 1..30: note = P antigen family member 5 (46-55)
  source 1..30: mol_type = other RNA
gtgatcgtccagcaacccaccgaggaaaag

SEQ ID NO: 76165 - RNA, 42 nt, synthetic construct
  misc_feature 1..42: note = Myosin-10 (20-33)
  source 1..42: mol_type = other RNA
gtgatctacaaccccgccacccaggctgactggacagcaaag

SEQ ID NO: 76166 - RNA, 33 nt, synthetic construct
  misc_feature 1..33: note = Protein-methionine sulfoxide oxidase MICAL1 (432-442)
  source 1..33: mol_type = other RNA
gtgctggccgagagagaaagcctctaccagctt

SEQ ID NO: 76167 - RNA, 30 nt, synthetic construct
  misc_feature 1..30: note = Protocadherin alpha-1 (636-645)
  source 1..30: mol_type = other RNA
gtgctggacgaggccgatctcagcagatac

SEQ ID NO: 76168 - RNA, 27 nt, synthetic construct
  misc_feature 1..27: note = NF-kappa-B inhibitor epsilon (286-294)
  source 1..27: mol_type = other RNA
gtgctggacatccagaacaatctctac

SEQ ID NO: 76169 - RNA, 33 nt, synthetic construct
  misc_feature 1..33: note = Peroxisomal trans-2-enoyl-CoA reductase (146-156)
  source 1..33: mol_type = other RNA
gtgctggagaccaacctcacaggcactttctac

SEQ ID NO: 76170 - RNA, 33 nt, synthetic construct
  misc_feature 1..33: note = Translocon-associated protein subunit alpha (19-29)
  source 1..33: mol_type = other RNA
gtgctgttcagaggcgggcccaggggactcctt

SEQ ID NO: 76171 - RNA, 27 nt, synthetic construct
  misc_feature 1..27: note = ETS translocation variant 5 (79-87)
  source 1..27: mol_type = other RNA
gtgctgcacgccccccctccaaccaag

SEQ ID NO: 76172 - RNA, 27 nt, synthetic construct
  misc_feature 1..27: note = Sorting nexin-14 (176-184)
  source 1..27: mol_type = other RNA
gtgctgatcagaaggattcacaaggtc

SEQ ID NO: 76173 - RNA, 36 nt, synthetic construct
  misc_feature 1..36: note = Transcription initiation factor IIE subunit beta (280-291)
  source 1..36: mol_type = other RNA
gtgctgaaggactacagcgatatcacctcctctaaa

SEQ ID NO: 76174 - RNA, 33 nt, synthetic construct
  misc_feature 1..33: note = Adenosylhomocysteinase 2 (123-133)
  source 1..33: mol_type = other RNA
gtgctgctcgccgagggcagacttctgaacttg

SEQ ID NO: 76175 - RNA, 33 nt, synthetic construct
  misc_feature 1..33: note = Splicing factor 3B subunit 2 (163-173)
  source 1..33: mol_type = other RNA
gtgctgctcgagcaggaaagacaacaggagatc

SEQ ID NO: 76176 - RNA, 39 nt, synthetic construct
  misc_feature 1..39: note = Sodium-dependent phosphate transporter 1 (75-87)
  source 1..39: mol_type = other RNA
gtgctgctcggcgccaaggtcagcgagaccatcagaaaa

SEQ ID NO: 76177 - RNA, 30 nt, synthetic construct
  misc_feature 1..30: note = HCG2043033, isoform CRA_b (11-20)
  source 1..30: mol_type = other RNA
gtgctgatgggcctcccccttgcccaggct

SEQ ID NO: 76178 - RNA, 30 nt, synthetic construct
  misc_feature 1..30: note = Armadillo repeat-containing X-linked protein 1 (210-219)
  source 1..30: mol_type = other RNA
gtgctgaacatcctcgagagaaccaatgac

SEQ ID NO: 76179 - RNA, 27 nt, synthetic construct
  misc_feature 1..27: note = Protein GPR108 (359-367)
  source 1..27: mol_type = other RNA
gtgctgagcgacaaggagaaaaaggtc

SEQ ID NO: 76180 - RNA, 30 nt, synthetic construct
  misc_feature 1..30: note = Leucine-rich repeat-containing protein 1 (295-304)
  source 1..30: mol_type = other RNA
gtgctgaccgagaaccagctccttacactg

SEQ ID NO: 76181 - RNA, 33 nt, synthetic construct
  misc_feature 1..33: note = 2',3'-cyclic-nucleotide 3'-phosphodiesterase (126-136)
  source 1..33: mol_type = other RNA
gtgctggtcgagcccaagaccgcctggagactc

SEQ ID NO: 76182 - RNA, 33 nt, synthetic construct
  misc_feature 1..33: note = Zinc finger CCHC domain-containing protein 14 (120-130)
  source 1..33: mol_type = other RNA
gtgctgtggagcgactcctctatcacctcagtc

SEQ ID NO: 76183 - RNA, 30 nt, synthetic construct
  misc_feature 1..30: note = ADP/ATP translocase 1 (288-297)
  source 1..30: mol_type = other RNA
gtgctgtacgacgagatcaagaaatatgtc

SEQ ID NO: 76184 - RNA, 36 nt, synthetic construct
  misc_feature 1..36: note = Sodium/potassium/calcium exchanger 5 (423-434)
  source 1..36: mol_type = other RNA
gtgctgtacgagctcggcatcattgggaacaataag

SEQ ID NO: 76185 - RNA, 33 nt, synthetic construct
  misc_feature 1..33: note = Cytoplasmic dynein 1 heavy chain 1 (3839-3849)
  source 1..33: mol_type = other RNA
gtgctgtacgagaaccccaatctcaagggcgtc

SEQ ID NO: 76186 - RNA, 45 nt, synthetic construct
  misc_feature 1..45: note Dolichyl-diphosphooligosaccharide-proteinosyltransferase subunit 4 (23-37)
  source 1..45: mol_type = other RNA
gtgctgtaccactatgtcgccgttaacaatcccaagaaacaggag

SEQ ID NO: 76187 - RNA, 39 nt, synthetic construct
  misc_feature 1..39: note = Ras-related protein Rab-27A (25-37)
  source 1..39: mol_type = other RNA
gtgctgtaccagtataccgacggcaagttcaacagcaaa

SEQ ID NO: 76188 - RNA, 24 nt, synthetic construct
  misc_feature 1..24: note = HLA class I histocompatibility antigen, A-29 alpha chain (3-10)
  source 1..24: mol_type = other RNA
gtgatggcccccagaaccctgctc

SEQ ID NO: 76189 - RNA, 27 nt, synthetic construct
  misc_feature 1..27: note = Embryonic stem cell-specific 5-hydroxymethylcytosine-binding protein (102-110)
  source 1..27: mol_type = other RNA
gtgatggagaagagaagcttcaaagtc

SEQ ID NO: 76190 - RNA, 33 nt, synthetic construct
  misc_feature 1..33: note = Ribosomal protein S6 kinase alpha-2 (56-66)
  source 1..33: mol_type = other RNA
gtgatgttcaccgaggaagacgtcaagttttac

SEQ ID NO: 76191 - RNA, 27 nt, synthetic construct
  misc_feature 1..27: note = Antigen KI-67 (115-123)
  source 1..27: mol_type = other RNA
gtgatgcacaccccccctgtcctgaag

SEQ ID NO: 76192 - RNA, 39 nt, synthetic construct
  misc_feature 1..39: note = Transient receptor potential cation channel subfamily V member 2 (253-265)
  source 1..39: mol_type = other RNA
gtgatgatcagcgacaactccgccgagaatattgctctg

SEQ ID NO: 76193 - RNA, 27 nt, synthetic construct
  misc_feature 1..27: note = Signal transducer and activator of transcription 1-alpha/beta (134-142)
  source 1..27: mol_type = other RNA
gtgatgctggacaagcagaaagagctc

SEQ ID NO: 76194 - RNA, 30 nt, synthetic construct
  misc_feature 1..30: note = Poly(U)-binding-splicing factor PUF60 (175-184)
  source 1..30: mol_type = other RNA
gtgatgctgggcgggagaaacatcaaggtc

SEQ ID NO: 76195 - RNA, 27 nt, synthetic construct
  misc_feature 1..27: note = Transcriptional coactivator YAP1 (72-80)
  source 1..27: mol_type = other RNA
gtgatgaaccccaagaccgccaatgtc

SEQ ID NO: 76196 - RNA, 27 nt, synthetic construct
  misc_feature 1..27: note = CD63 antigen (111-119)
  source 1..27: mol_type = other RNA
gtgatgagcgagttcaacaataacttt

SEQ ID NO: 76197 - RNA, 30 nt, synthetic construct
  misc_feature 1..30: note = Ras-related C3 botulinum toxin substrate 1 (44-53)
  source 1..30: mol_type = other RNA
gtgatggtcgacggcaagcccgttaacctg

SEQ ID NO: 76198 - RNA, 33 nt, synthetic construct
  misc_feature 1..33: note = Uncharacterized protein C4orf36 (5-15)
  source 1..33: mol_type = other RNA
gtgcccagaaagaacaccgtcaaaacaatcctg

SEQ ID NO: 76199 - RNA, 27 nt, synthetic construct
  misc_feature 1..27: note = Zinc finger protein ZFAT (1182-1190)
  source 1..27: mol_type = other RNA
gtgcagcaagccagcgtcgagctggct

SEQ ID NO: 76200 - RNA, 27 nt, synthetic construct
  misc_feature 1..27: note = tRNA wybutosine-synthesizing protein 4 (287-295)
  source 1..27: mol_type = other RNA
gtgcagtgggacggcagactgtaccac

SEQ ID NO: 76201 - RNA, 27 nt, synthetic construct
  misc_feature 1..27: note = Pre-mRNA-processing-splicing factor 8 (1168-1176)
  source 1..27: mol_type = other RNA
gtgcagtgggagaacagcttcgtctcc

SEQ ID NO: 76202 - RNA, 33 nt, synthetic construct
  misc_feature 1..33: note = Unconventional myosin-X (553-563)
  source 1..33: mol_type = other RNA
gtgcagtacgacgtcagaggcatcctggagaag

SEQ ID NO: 76203 - RNA, 54 nt, synthetic construct
  misc_feature 1..54: note = Probable ATP-dependent RNA helicase DDX5 (550-567)
  source 1..54: mol_type = other RNA
gtgagcgccggcatccagacctccttcagaacagggaaccccactggaacgtac

SEQ ID NO: 76204 - RNA, 27 nt, synthetic construct
  misc_feature 1..27: note = 60S ribosomal protein L24 (148-156)
  source 1..27: mol_type = other RNA
gtgagcgcccccagagtcggcgggaag

SEQ ID NO: 76205 - RNA, 27 nt, synthetic construct
  misc_feature 1..27: note = NADH dehydrogenase (ubiquinone) iron-sulfur protein 2, mitochondrial (8-16)
  source 1..27: mol_type = other RNA
gtgagcgacggctcctctagaccctac

SEQ ID NO: 76206 - RNA, 27 nt, synthetic construct
  misc_feature 1..27: note = Single Ig IL-1-related receptor (387-395)
  source 1..27: mol_type = other RNA
gtgagcgacctgggctccagaaactac

SEQ ID NO: 76207 - RNA, 27 nt, synthetic construct
  misc_feature 1..27: note = MAM domain-containingosylphosphatidylinositol anchor protein 1 (140-148)
  source 1..27: mol_type = other RNA
gtgagcgacgtcagaggcaacttctac

SEQ ID NO: 76208 - RNA, 33 nt, synthetic construct
  misc_feature 1..33: note = Protein eva-1 homolog A (27-37)
  source 1..33: mol_type = other RNA
gtgagcgagaaccccgaaagagccgctctgtac

SEQ ID NO: 76209 - RNA, 27 nt, synthetic construct
  misc_feature 1..27: note = Clustered mitochondria protein homolog (512-520)
  source 1..27: mol_type = other RNA
gtgagccaccccagatacctggagctc

SEQ ID NO: 76210 - RNA, 27 nt, synthetic construct
  misc_feature 1..27: note = ER degradation-enhancing alpha-mannosidase-like protein 2 (270-278)
  source 1..27: mol_type = other RNA
gtgagcatgcccgtcttccagtccctg

SEQ ID NO: 76211 - RNA, 33 nt, synthetic construct
  misc_feature 1..33: note = Transmembrane protein 50A (73-83)
  source 1..33: mol_type = other RNA
gtgagcaacggccaggtcagaggggactcctac

SEQ ID NO: 76212 - RNA, 36 nt, synthetic construct
  misc_feature 1..36: note = Natriuretic peptides A (87-98)
  source 1..36: mol_type = other RNA
gtgagccccgcccagagagacggcggggctctggga

SEQ ID NO: 76213 - RNA, 27 nt, synthetic construct
  misc_feature 1..27: note = Pre-mRNA-processing-splicing factor 8 (2131-2139)
  source 1..27: mol_type = other RNA
gtgagcccccctgacaacccacaggtc

SEQ ID NO: 76214 - RNA, 33 nt, synthetic construct
  misc_feature 1..33: note = PRO2822 (92-102)
  source 1..33: mol_type = other RNA
gtgagccaggacggcctgaacctccttaccctg

SEQ ID NO: 76215 - RNA, 30 nt, synthetic construct
  misc_feature 1..30: note = PAB-dependent poly(A)-specific ribonuclease subunit PAN3 (183-192)
  source 1..30: mol_type = other RNA
gtgagccagaccccctcctctggccaagtc

SEQ ID NO: 76216 - RNA, 30 nt, synthetic construct
  misc_feature 1..30: note = Heat shock cognate 71 kDa protein (536-545)
  source 1..30: mol_type = other RNA
gtgagctccaagaactctctggagtcatac

SEQ ID NO: 76217 - RNA, 27 nt, synthetic construct
  misc_feature 1..27: note = Zinc finger protein with KRAB and SCAN domains 2 (134-142)
  source 1..27: mol_type = other RNA
gtgagctcccccgtccacagagagaag

SEQ ID NO: 76218 - RNA, 33 nt, synthetic construct
  misc_feature 1..33: note = Complex I assembly factor TMEM126B, mitochondrial (46-56)
  source 1..33: mol_type = other RNA
gtgaccgacaagctgttcgtcatcgatgccctc

SEQ ID NO: 76219 - RNA, 27 nt, synthetic construct
  misc_feature 1..27: note = Uncharacterized protein C11orf63 (295-303)
  source 1..27: mol_type = other RNA
gtgaccgacaagacaagcatccagaac

SEQ ID NO: 76220 - RNA, 27 nt, synthetic construct
  misc_feature 1..27: note = Receptor-type tyrosine-protein phosphatase zeta (705-713)
  source 1..27: mol_type = other RNA
gtgaccgacctggagatgccccactac

SEQ ID NO: 76221 - RNA, 24 nt, synthetic construct
  misc_feature 1..24: note = F-box/LRR-repeat protein 7 (316-323)
  source 1..24: mol_type = other RNA
gtgaccgacgtcggcatcagatac

SEQ ID NO: 76222 - RNA, 33 nt, synthetic construct
  misc_feature 1..33: note = Heterogeneous nuclear ribonucleoprotein Q (266-276)
  source 1..33: mol_type = other RNA
gtgaccgagggcctgacagacgtcatcctctac

SEQ ID NO: 76223 - RNA, 24 nt, synthetic construct
  misc_feature 1..24: note = Filamin-A (2353-2360)
  source 1..24: mol_type = other RNA
gtgaccgagatcgaccaggataag

SEQ ID NO: 76224 - RNA, 30 nt, synthetic construct
  misc_feature 1..30: note = 1-acyl-sn-glycerol-3-phosphate acyltransferase gamma (296-305)
  source 1..30: mol_type = other RNA
gtgaccgagatcgaaaagggcagctcctac

SEQ ID NO: 76225 - RNA, 30 nt, synthetic construct
  misc_feature 1..30: note = Carbonic anhydrase-related protein (181-190)
  source 1..30: mol_type = other RNA
gtgaccgagatcctgcaggacattcaatac

SEQ ID NO: 76226 - RNA, 30 nt, synthetic construct
  misc_feature 1..30: note = Short-chain-specific acyl-CoA dehydrogenase, mitochondrial (369-378)
  source 1..30: mol_type = other RNA
gtgaccgagatgcccgccgaaagacactac

SEQ ID NO: 76227 - RNA, 27 nt, synthetic construct
  misc_feature 1..27: note = Tyrosine-protein kinase TXK (10-18)
  source 1..27: mol_type = other RNA
gtgaccgagaacaagatcacaaatctg

SEQ ID NO: 76228 - RNA, 21 nt, synthetic construct
  misc_feature 1..21: note = Integrin beta-3 (336-342)
  source 1..21: mol_type = other RNA
gtgaccgagaacgtcgttaat

SEQ ID NO: 76229 - RNA, 27 nt, synthetic construct
  misc_feature 1..27: note = Integrin beta-3 (336-344)
  source 1..27: mol_type = other RNA
gtgaccgagaacgtcgttaatctgtac

SEQ ID NO: 76230 - RNA, 36 nt, synthetic construct
  misc_feature 1..36: note = Integrin beta-3 (336-347)
  source 1..36: mol_type = other RNA
gtgaccgagaacgtcgttaatctgtaccagaactat

SEQ ID NO: 76231 - RNA, 30 nt, synthetic construct
  misc_feature 1..30: note = Myosin phosphatase Rho-interacting protein (65-74)
  source 1..30: mol_type = other RNA
gtgaccgagtaccccgtccagagaaactat

SEQ ID NO: 76232 - RNA, 27 nt, synthetic construct
  misc_feature 1..27: note = Lymphocyte antigen 6E (61-69)
  source 1..27: mol_type = other RNA
gtgaccttcggccacagcctgtccaag

SEQ ID NO: 76233 - RNA, 27 nt, synthetic construct
  misc_feature 1..27: note = OX-2 membraneoprotein (76-84)
  source 1..27: mol_type = other RNA
gtgaccttcagcgagaaccacggcgtc

SEQ ID NO: 76234 - RNA, 30 nt, synthetic construct; identical to SEQ ID NO: 52007
  misc_feature 1..30: note = Annexin A9 (3-12)
  source 1..30: mol_type = other RNA

SEQ ID NO: 76235 - RNA, 30 nt, synthetic construct
  misc_feature 1..30: note = Zinc finger FYVE domain-containing protein 16 (97-106)
  source 1..30: mol_type = other RNA
gtgaccggcctggacctccttagctccgtc

SEQ ID NO: 76236 - RNA, 33 nt, synthetic construct
  misc_feature 1..33: note = Kinesin-like protein KIF6 (24-34)
  source 1..33: mol_type = other RNA
gtgaccatcgacgataacaagcagattctgaaa

SEQ ID NO: 76237 - RNA, 27 nt, synthetic construct
  misc_feature 1..27: note = RNA pseudouridylate synthase domain-containing protein 1 (112-120)
  source 1..27: mol_type = other RNA
gtgaccatcagccacgccattggcaga

SEQ ID NO: 76238 - RNA, 27 nt, synthetic construct
  misc_feature 1..27: note = Endoribonuclease Dicer (827-835)
  source 1..27: mol_type = other RNA
gtgaccatcagcattgagctgaagaaa

SEQ ID NO: 76239 - RNA, 33 nt, synthetic construct
  misc_feature 1..33: note = FACT complex subunit SPT16 (3-13)
  source 1..33: mol_type = other RNA
gtgaccctggacaaggatgcctactatagaagg

SEQ ID NO: 76240 - RNA, 27 nt, synthetic construct
  misc_feature 1..27: note = Pappalysin-1 (689-697)
  source 1..27: mol_type = other RNA
gtgaccctggagtggttcccccctatc

SEQ ID NO: 76241 - RNA, 30 nt, synthetic construct
  misc_feature 1..30: note = Autophagy-related protein 9A (411-420)
  source 1..30: mol_type = other RNA
gtgaccctgctcggcgtcacagttactgtg

SEQ ID NO: 76242 - RNA, 30 nt, synthetic construct
  misc_feature 1..30: note = WD repeat-containing protein 70 (23-32)
  source 1..30: mol_type = other RNA
gtgaccatgggcttcacagggtttggaaag

SEQ ID NO: 76243 - RNA, 33 nt, synthetic construct
  misc_feature 1..33: note = Small subunit processome component 20 homolog (830-840)
  source 1..33: mol_type = other RNA
gtgaccaaccccgacatcgccgctaagaaaaag

SEQ ID NO: 76244 - RNA, 27 nt, synthetic construct
  misc_feature 1..27: note = DNA (cytosine-5)-methyltransferase 1 (1422-1430)
  source 1..27: mol_type = other RNA
gtgaccaaccccgagcctatgggcaag

SEQ ID NO: 76245 - RNA, 27 nt, synthetic construct
  misc_feature 1..27: note = Beta-parvin (138-146)
  source 1..27: mol_type = other RNA
gtgacccagagcgagatcggccaaaag

SEQ ID NO: 76246 - RNA, 27 nt, synthetic construct
  misc_feature 1..27: note = Polymerase delta-interacting protein 3 (410-418)
  source 1..27: mol_type = other RNA
gtgaccacacagcccactgagttcaag

SEQ ID NO: 76247 - RNA, 30 nt, synthetic construct
  misc_feature 1..30: note = Polycystin-1 (1443-1452)
  source 1..30: mol_type = other RNA
gtgaccgtcacagccagcaacaatatctcc

SEQ ID NO: 76248 - RNA, 27 nt, synthetic construct
  misc_feature 1..27: note = LisH domain-containing protein ARMC9 (225-233)
  source 1..27: mol_type = other RNA
gtgacctacctgaagagatataacaaa

SEQ ID NO: 76249 - RNA, 33 nt, synthetic construct
  misc_feature 1..33: note = Trafficking protein particle complex subunit 2-like protein (8-18)
  source 1..33: mol_type = other RNA
gtggtcgacgagaagatcagcgccatgggcaaa

SEQ ID NO: 76250 - RNA, 30 nt, synthetic construct; identical to SEQ ID NO: 52023
  misc_feature 1..30: note = Beta-actin-like protein 2 (10-19)
  source 1..30: mol_type = other RNA

SEQ ID NO: 76251 - RNA, 36 nt, synthetic construct
  misc_feature 1..36: note = Beta-actin-like protein 2 (10-21)
  source 1..36: mol_type = other RNA
gtggtcgacaacggcagcgggatgtgcaaggccgga

SEQ ID NO: 76252 - RNA, 27 nt, synthetic construct
  misc_feature 1..27: note = Cytosolic acyl coenzyme A thioester hydrolase (273-281)
  source 1..27: mol_type = other RNA
gtggtcgacagctcccagaagagatac

SEQ ID NO: 76253 - RNA, 30 nt, synthetic construct
  misc_feature 1..30: note = Catalase (55-64)
  source 1..30: mol_type = other RNA
gtggtcttcaccgacgagatggcccacttt

SEQ ID NO: 76254 - RNA, 33 nt, synthetic construct
  misc_feature 1..33: note = RAB6A-GEF complex partner protein 2 (239-249)
  source 1..33: mol_type = other RNA
gtggtcggcaccctgaacctcggggagggaaca

SEQ ID NO: 76255 - RNA, 33 nt, synthetic construct
  misc_feature 1..33: note = Retroviral-like aspartic protease 1 (242-252)
  source 1..33: mol_type = other RNA
gtggtcaaggttgccaacggcgctgagatgaaa

SEQ ID NO: 76256 - RNA, 33 nt, synthetic construct; identical to SEQ ID NO: 52029
  misc_feature 1..33: note = Thiosulfate sulfurtransferase (97-107)
  source 1..33: mol_type = other RNA

SEQ ID NO: 76257 - RNA, 27 nt, synthetic construct
  misc_feature 1..27: note = Keratinocyte-associated transmembrane protein 2 (212-220)
  source 1..27: mol_type = other RNA
gtggtctacatcacctatcacaacaag

SEQ ID NO: 76258 - RNA, 39 nt, synthetic construct
  misc_feature 1..39: note = HLA class I histocompatibility antigen, B-40 alpha chain (243-255)
  source 1..39: mol_type = other RNA
tgggccgctgtggtcgttcccagcggcgaggaacagaga

SEQ ID NO: 76259 - RNA, 27 nt, synthetic construct
  misc_feature 1..27: note = Glycerol kinase (156-164)
  source 1..27: mol_type = other RNA
tggctgctcgacaacgtgagaaaggtc

SEQ ID NO: 76260 - RNA, 33 nt, synthetic construct
  misc_feature 1..33: note = Protein transport protein Sec61 subunit alpha isoform 1 (324-334)
  source 1..33: mol_type = other RNA
tggagcgacacctcctctggcgggcccgccaga

SEQ ID NO: 76261 - RNA, 30 nt, synthetic construct
  misc_feature 1..30: note = Ubiquitin carboxyl-terminal hydrolase 48 (533-542)
  source 1..30: mol_type = other RNA
tacgccgctgacatcttctatagcagatac

SEQ ID NO: 76262 - RNA, 27 nt, synthetic construct
  misc_feature 1..27: note = RNA-binding protein 14 (528-536)
  source 1..27: mol_type = other RNA
tacgccgctcagcaacacccccaggca

SEQ ID NO: 76263 - RNA, 33 nt, synthetic construct
  misc_feature 1..33: note = Unconventional myosin-Va (62-72)
  source 1..33: mol_type = other RNA
tacgccgacgatcccaagaaatatcagagctac

SEQ ID NO: 76264 - RNA, 30 nt, synthetic construct
  misc_feature 1..30: note = V-type proton ATPase subunit B, kidney isoform (384-393)
  source 1..30: mol_type = other RNA
tacgccatcggcaaggacgtgcaggctatg

SEQ ID NO: 76265 - RNA, 27 nt, synthetic construct
  misc_feature 1..27: note = Junction plakoglobin (245-253)
  source 1..27: mol_type = other RNA
tacgccatcaccacactgcacaacctc

SEQ ID NO: 76266 - RNA, 27 nt, synthetic construct
  misc_feature 1..27: note = Threonine-tRNA ligase, mitochondrial (546-554)
  source 1..27: mol_type = other RNA
tacgccaaggaggctcagcaaagcctg

SEQ ID NO: 76267 - RNA, 27 nt, synthetic construct
  misc_feature 1..27: note = G2/mitotic-specific cyclin-B2 (368-376)
  source 1..27: mol_type = other RNA
tacgccagctccaagctgctcaaaatc

SEQ ID NO: 76268 - RNA, 27 nt, synthetic construct
  misc_feature 1..27: note = Heterogeneous nuclear ribonucleoprotein L (430-438)
  source 1..27: mol_type = other RNA
tacgccgtggacagagctatcacccac

SEQ ID NO: 76269 - RNA, 33 nt, synthetic construct
  misc_feature 1..33: note = Protein-methionine sulfoxide oxidase MICAL3 (803-813)
  source 1..33: mol_type = other RNA
tacgcctatgacatcgaggatggcaagttctac

SEQ ID NO: 76270 - RNA, 27 nt, synthetic construct
  misc_feature 1..27: note = Hypoxia-inducible factor 1-alpha (254-262)
  source 1..27: mol_type = other RNA
tactgcgacgagagaatcaccgaactg

SEQ ID NO: 76271 - RNA, 27 nt, synthetic construct
  misc_feature 1..27: note = Zinc finger protein 362 (287-295)
  source 1..27: mol_type = other RNA
tactgcgacaagagcttcagacagctg

SEQ ID NO: 76272 - RNA, 39 nt, synthetic construct
  misc_feature 1..39: note = Cofilin-1 (85-97)
  source 1..39: mol_type = other RNA
tacgacgccacctatgagacaaaggaaagcaaaaaggag

SEQ ID NO: 76273 - RNA, 30 nt, synthetic construct
  misc_feature 1..30: note = Melanoma antigen preferentially expressed in tumors (448-457)
  source 1..30: mol_type = other RNA
tacgaggacatccacggcaccctgcatctc

SEQ ID NO: 76274 - RNA, 27 nt, synthetic construct
  misc_feature 1..27: note = Transmembrane protein 9B (93-101)
  source 1..27: mol_type = other RNA
tacgaggaaagaagctccgtgaccatc

SEQ ID NO: 76275 - RNA, 33 nt, synthetic construct
  misc_feature 1..33: note = Ubiquitin-like protein 5 (60-70)
  source 1..33: mol_type = other RNA
tacgagatccacgacggcatgaacctggaactc

SEQ ID NO: 76276 - RNA, 36 nt, synthetic construct
  misc_feature 1..36: note = HLA class I histocompatibility antigen, alpha chain E (124-135)
  source 1..36: mol_type = other RNA
tacgagcagttcgcctatgacggcaaggattacctg

SEQ ID NO: 76277 - RNA, 27 nt, synthetic construct
  misc_feature 1..27: note = Carbohydrate sulfotransferase 14 (199-207)
  source 1..27: mol_type = other RNA
tacggcgccgagatcgtgagaaggtat

SEQ ID NO: 76278 - RNA, 27 nt, synthetic construct
  misc_feature 1..27: note = RNA-binding protein 14 (474-482)
  source 1..27: mol_type = other RNA
tacggcgcccaggctagcatggggctg

SEQ ID NO: 76279 - RNA, 33 nt, synthetic construct
  misc_feature 1..33: note = Transcription factor SOX-10 (412-422)
  source 1..33: mol_type = other RNA
tacggccacagcgggcaggcctccggactgtat

SEQ ID NO: 76280 - RNA, 36 nt, synthetic construct
  misc_feature 1..36: note = Heterogeneous nuclear ribonucleoproteins A2/B1 (243-254)
  source 1..36: mol_type = other RNA
tacggcagcgggaactataatgacttcggaaactac

SEQ ID NO: 76281 - RNA, 30 nt, synthetic construct
  misc_feature 1..30: note = RNMT-activating mini protein (107-116)
  source 1..30: mol_type = other RNA
tacggctataaccagagacccccttacggg

SEQ ID NO: 76282 - RNA, 30 nt, synthetic construct
  misc_feature 1..30: note = Histone deacetylase complex subunit SAP130 (880-889)
  source 1..30: mol_type = other RNA
tacatcgacgaggaaggcgtgagatatgtc

SEQ ID NO: 76283 - RNA, 33 nt, synthetic construct
  misc_feature 1..33: note = Cleft lip and palate transmembrane protein 1 (409-419)
  source 1..33: mol_type = other RNA
tacatcctggacaacgagaccaatttcgtggtc

SEQ ID NO: 76284 - RNA, 33 nt, synthetic construct
  misc_feature 1..33: note = Negative elongation factor C/D (47-57)
  source 1..33: mol_type = other RNA
tacatcatggagcccagcattttcaacaccctg

SEQ ID NO: 76285 - RNA, 27 nt, synthetic construct
  misc_feature 1..27: note = Filamin-B (1580-1588)
  source 1..27: mol_type = other RNA
tacatccccgacaagaccggcagatat

SEQ ID NO: 76286 - RNA, 27 nt, synthetic construct
  misc_feature 1..27: note = Beta-catenin-interacting protein 1 (15-23)
  source 1..27: mol_type = other RNA
tacatccagcaaaaggtgagagtcctg

SEQ ID NO: 76287 - RNA, 30 nt, synthetic construct
  misc_feature 1..30: note = Signal recognition particle 9 kDa protein (18-27)
  source 1..30: mol_type = other RNA
tacctggccgaccccatgaaggctagagtg

SEQ ID NO: 76288 - RNA, 27 nt, synthetic construct
  misc_feature 1..27: note = S-phase kinase-associated protein 1 (33-41)
  source 1..27: mol_type = other RNA
tacctggacatcaagggcctccttgat

SEQ ID NO: 76289 - RNA, 30 nt, synthetic construct
  misc_feature 1..30: note = Procollagen-lysine,2-oxoglutarate 5-dioxygenase 3 (199-208)
  source 1..30: mol_type = other RNA
tacctggaccccggcctcagagagaagctt

SEQ ID NO: 76290 - RNA, 30 nt, synthetic construct; identical to SEQ ID NO: 52063
  misc_feature 1..30: note = Protein dpy-30 homolog (56-65)
  source 1..30: mol_type = other RNA

SEQ ID NO: 76291 - RNA, 33 nt, synthetic construct
  misc_feature 1..33: note = Lysyl oxidase homolog 4 (547-557)
  source 1..33: mol_type = other RNA
tacctggaggacagacccctcagccagctttat

SEQ ID NO: 76292 - RNA, 36 nt, synthetic construct
  misc_feature 1..36: note = Ectonucleotide pyrophosphatase/phosphodiesterase family member 1 (319-330)
  source 1..36: mol_type = other RNA
tacctggaggaacccgacagctccggccactcttat

SEQ ID NO: 76293 - RNA, 27 nt, synthetic construct
  misc_feature 1..27: note = HLA class I histocompatibility antigen, Cw-8 alpha chain (170-178)
  source 1..27: mol_type = other RNA
tacctggagaacggcaagaaaaccctc

SEQ ID NO: 76294 - RNA, 33 nt, synthetic construct
  misc_feature 1..33: note = Prolyl endopeptidase (353-363)
  source 1..33: mol_type = other RNA
tacctgcacgacgtgaagaacatcctccagctt

SEQ ID NO: 76295 - RNA, 33 nt, synthetic construct
  misc_feature 1..33: note = Unconventional myosin-Vb (79-89)
  source 1..33: mol_type = other RNA
tacctgcacgagcccgccgtgctccataacctt

SEQ ID NO: 76296 - RNA, 33 nt, synthetic construct
  misc_feature 1..33: note = Dystonin (981-991)
  source 1..33: mol_type = other RNA
tacctgatcaacgagattgacagaataagggcc

SEQ ID NO: 76297 - RNA, 33 nt, synthetic construct
  misc_feature 1..33: note = Tubulin polyglutamylase TTLL5 (191-201)
  source 1..33: mol_type = other RNA
tacctgatcaacaatcccaaccagattagcctc

SEQ ID NO: 76298 - RNA, 36 nt, synthetic construct
  misc_feature 1..36: note = Vacuolar protein sorting-associated protein 13C (2639-2650)
  source 1..36: mol_type = other RNA
tacctgctcgagggcaccgccgaaacacacgagctt

SEQ ID NO: 76299 - RNA, 27 nt, synthetic construct
  misc_feature 1..27: note = Unconventional myosin-XIX (218-226)
  source 1..27: mol_type = other RNA
tacctgctcgagaagaccagagtggcc

SEQ ID NO: 76300 - RNA, 30 nt, synthetic construct
  misc_feature 1..30: note = Transforming growth factor-beta receptor-associated protein 1 (431-440)
  source 1..30: mol_type = other RNA
tacctgaacgaggtgagaagcaccgaagtc

SEQ ID NO: 76301 - RNA, 33 nt, synthetic construct
  misc_feature 1..33: note = CD302 antigen (163-173)
  source 1..33: mol_type = other RNA
tacctgagcgacaaccacatcctcatttccgcc

SEQ ID NO: 76302 - RNA, 33 nt, synthetic construct
  misc_feature 1..33: note = GPI inositol-deacylase (41-51)
  source 1..33: mol_type = other RNA
tacatgttcgagtatcccgaataccagaagatc

SEQ ID NO: 76303 - RNA, 33 nt, synthetic construct
  misc_feature 1..33: note = Methyl-CpG-binding domain protein 4 (530-540)
  source 1..33: mol_type = other RNA
taccccatcgagctgcacggcattgggaagtat

SEQ ID NO: 76304 - RNA, 27 nt, synthetic construct
  misc_feature 1..27: note = TRIO and F-actin-binding protein (394-402)
  source 1..27: mol_type = other RNA
taccaggaggaactgagcagagagctc

SEQ ID NO: 76305 - RNA, 27 nt, synthetic construct
  misc_feature 1..27: note = ATP synthase-coupling factor 6, mitochondrial (75-83)
  source 1..27: mol_type = other RNA
taccagcaagagctggaaagagagctc

SEQ ID NO: 76306 - RNA, 33 nt, synthetic construct
  misc_feature 1..33: note = Caprin-1 (665-675)
  source 1..33: mol_type = other RNA
taccagagagacggctatcaacagaacttcaag

SEQ ID NO: 76307 - RNA, 30 nt, synthetic construct
  misc_feature 1..30: note = Melanocyte protein PMEL (485-494)
  source 1..30: mol_type = other RNA
tacagatatggcagcttctccgtgaccctg

SEQ ID NO: 76308 - RNA, 30 nt, synthetic construct
  misc_feature 1..30: note = PDZ and LIM domain protein 2 (315-324)
  source 1..30: mol_type = other RNA
tacagcgcccccgctaccctgtcctctaga

SEQ ID NO: 76309 - RNA, 45 nt, synthetic construct
  misc_feature 1..45: note = Interleukin enhancer-binding factor 3 (690-704)
  source 1..45: mol_type = other RNA
tacagcgacttctttaccgattgctatggctaccacgacttcggg

SEQ ID NO: 76310 - RNA, 27 nt, synthetic construct
  misc_feature 1..27: note = Sphingosine-1-phosphate lyase 1 (366-374)
  source 1..27: mol_type = other RNA
tacagcgacaagaaatatagaaactac

SEQ ID NO: 76311 - RNA, 51 nt, synthetic construct
  misc_feature 1..51: note = Cold-inducible RNA-binding protein (151-167)
  source 1..51: mol_type = other RNA
tacagcgacagatcctctggcgggtcatatagggatagttacgacagctat

SEQ ID NO: 76312 - RNA, 30 nt, synthetic construct
  misc_feature 1..30: note = AF4/FMR2 family member 2 (1092-1101)
  source 1..30: mol_type = other RNA
tacagcgagaccgtggaactgctcagatat

SEQ ID NO: 76313 - RNA, 45 nt, synthetic construct
  misc_feature 1..45: note = Ribonucleoprotein PTB-binding 1 (601-615)
  source 1..45: mol_type = other RNA
tacagcttcgactatccctccgatatgggccctagaaggctgttt

SEQ ID NO: 76314 - RNA, 45 nt, synthetic construct
  misc_feature 1..45: note = Heterogeneous nuclear ribonucleoprotein A1 (260-274)
  source 1..45: mol_type = other RNA
tacagcggcgggtccagaggatatggttctggcgggcagggatac

SEQ ID NO: 76315 - RNA, 39 nt, synthetic construct
  misc_feature 1..39: note = Interleukin enhancer-binding factor 3 (624-636)
  source 1..39: mol_type = other RNA
tacagcggctccgggggaagatctggtggcaactcatat

SEQ ID NO: 76316 - RNA, 39 nt, synthetic construct
  misc_feature 1..39: note = Heterogeneous nuclear ribonucleoprotein D-like (222-234)
  source 1..39: mol_type = other RNA
tacagcggctatgggggatacgactataccggttacaac

SEQ ID NO: 76317 - RNA, 42 nt, synthetic construct
  misc_feature 1..42: note = Heterogeneous nuclear ribonucleoprotein D-like (222-235)
  source 1..42: mol_type = other RNA
tacagcggctatgggggatacgactataccggttacaactat

SEQ ID NO: 76318 - RNA, 42 nt, synthetic construct
  misc_feature 1..42: note = Caprin-1 (662-675)
  source 1..42: mol_type = other RNA
tacagcggctatcagagagacgggtaccaacagaacttcaag

SEQ ID NO: 76319 - RNA, 24 nt, synthetic construct
  misc_feature 1..24: note = Transmembrane protein 214 (171-178)
  source 1..24: mol_type = other RNA
tacagcctggtgtccagagagctc

SEQ ID NO: 76320 - RNA, 57 nt, synthetic construct
  misc_feature 1..57: note = Cold-inducible RNA-binding protein (142-160)
  source 1..57: mol_type = other RNA
tacagctccagatctcagtcaggcgggtatagtgacaggagctccggaggttcttac

SEQ ID NO: 76321 - RNA, 27 nt, synthetic construct
  misc_feature 1..27: note = Condensin complex subunit 2 (428-436)
  source 1..27: mol_type = other RNA
tacagctatttctcccccagaaccatg

SEQ ID NO: 76322 - RNA, 24 nt, synthetic construct
  misc_feature 1..24: note = CBP80/20-dependent translation initiation factor (506-513)
  source 1..24: mol_type = other RNA
tacacctgcctgagagagctcctt

SEQ ID NO: 76323 - RNA, 36 nt, synthetic construct
  misc_feature 1..36: note = Transcription factor SOX-10 (369-380)
  source 1..36: mol_type = other RNA
tacaccgaccagcccagcacatcccaaatcgcctat

SEQ ID NO: 76324 - RNA, 42 nt, synthetic construct
  misc_feature 1..42: note = Sialidase-1 (400-413)
  source 1..42: mol_type = other RNA
tacaccgagagcatctccgtggccaagatttctgtctatggc

SEQ ID NO: 76325 - RNA, 27 nt, synthetic construct
  misc_feature 1..27: note = Metalloproteinase inhibitor 3 (48-56)
  source 1..27: mol_type = other RNA
tacaccatcaagcagatgaaaatgtat

SEQ ID NO: 76326 - RNA, 27 nt, synthetic construct
  misc_feature 1..27: note = Nodal modulator 2 (59-67)
  source 1..27: mol_type = other RNA
tacaccaagcacggcacactgaaatat

SEQ ID NO: 76327 - RNA, 36 nt, synthetic construct
  misc_feature 1..36: note = Cyclin-dependent kinase 1 (4-15)
  source 1..36: mol_type = other RNA
tacaccaagatcgagaaaattggcgaagggacatat

SEQ ID NO: 76328 - RNA, 33 nt, synthetic construct
  misc_feature 1..33: note = Syndecan-3 (347-357)
  source 1..33: mol_type = other RNA
tacaccctggaggaacccaagcaggccagcgtg

SEQ ID NO: 76329 - RNA, 27 nt, synthetic construct
  misc_feature 1..27: note = Nuclear receptor ROR-beta (229-237)
  source 1..27: mol_type = other RNA
tacaccatggaggaactgcaccagctc

SEQ ID NO: 76330 - RNA, 45 nt, synthetic construct
  misc_feature 1..45: note = Caprin-1 (651-665)
  source 1..45: mol_type = other RNA
tacacccagagccaattctccgcccccagagactattctggctac

SEQ ID NO: 76331 - RNA, 27 nt, synthetic construct
  misc_feature 1..27: note = ATP-binding cassette sub-family B member 8, mitochondrial (162-170)
  source 1..27: mol_type = other RNA
tacaccagagaccacgtgggcagcttc

SEQ ID NO: 76332 - RNA, 27 nt, synthetic construct
  misc_feature 1..27: note = ATP-dependent 6-phosphofructokinase, platelet type (378-386)
  source 1..27: mol_type = other RNA
tacaccacagacttcatctatcagctg

SEQ ID NO: 76333 - RNA, 33 nt, synthetic construct
  misc_feature 1..33: note = Sulfhydryl oxidase 2 (323-333)
  source 1..33: mol_type = other RNA
tacaccgtggacctggagagcggcctccactat

SEQ ID NO: 76334 - RNA, 27 nt, synthetic construct
  misc_feature 1..27: note = ER degradation-enhancing alpha-mannosidase-like protein 2 (322-330)
  source 1..27: mol_type = other RNA
tacaccgtggagaagagagaaggctat

SEQ ID NO: 76335 - RNA, 33 nt, synthetic construct
  misc_feature 1..33: note = Membrane-associated transporter protein (439-449)
  source 1..33: mol_type = other RNA
tacaccgtgcccttcaacctgatcacagagtat

SEQ ID NO: 76336 - RNA, 27 nt, synthetic construct
  misc_feature 1..27: note Dolichyl-diphosphooligosaccharide-proteinosyltransferase 48 kDa subunit (325-333)
  source 1..27: mol_type = other RNA
tacaccgtgacagacctggtcgagtat

SEQ ID NO: 76337 - RNA, 36 nt, synthetic construct
  misc_feature 1..36: note = Sulfhydryl oxidase 1 (728-739)
  source 1..36: mol_type = other RNA
tacacctatttccaggccaagatcagagctctgaaa

SEQ ID NO: 76338 - RNA, 30 nt, synthetic construct
  misc_feature 1..30: note = Eukaryotic translation initiation factor 3 subunit E (286-295)
  source 1..30: mol_type = other RNA
tacacctataaggaccccatcacagagttc

SEQ ID NO: 76339 - RNA, 33 nt, synthetic construct
  misc_feature 1..33: note = ATP-binding cassette sub-family A member 7 (1610-1620)
  source 1..33: mol_type = other RNA
tacgtggcccccgctaacctgcctgcactcctt

SEQ ID NO: 76340 - RNA, 33 nt, synthetic construct
  misc_feature 1..33: note = General transcription factor 3C polypeptide 1 (627-637)
  source 1..33: mol_type = other RNA
tacgtggacgatgccagctggatgagatatatc

SEQ ID NO: 76341 - RNA, 27 nt, synthetic construct
  misc_feature 1..27: note = Spectrin alpha chain, non-erythrocytic 1 (2453-2461)
  source 1..27: mol_type = other RNA
tacgtggacggcaaggggagagagctg

SEQ ID NO: 76342 - RNA, 33 nt, synthetic construct
  misc_feature 1..33: note = Tribbles homolog 1 (157-167)
  source 1..33: mol_type = other RNA
tacgtgttctttgagaaggacttcggcgatatg

SEQ ID NO: 76343 - RNA, 27 nt, synthetic construct
  misc_feature 1..27: note = Kelch domain-containing protein 10 (220-228)
  source 1..27: mol_type = other RNA
tacgtgttcggcgggaccacaggatat

SEQ ID NO: 76344 - RNA, 30 nt, synthetic construct
  misc_feature 1..30: note = Actin, aortic smooth muscle (55-64)
  source 1..30: mol_type = other RNA
tacgtgggcgacgaggcccagagcaagaga

SEQ ID NO: 76345 - RNA, 33 nt, synthetic construct
  misc_feature 1..33: note = Actin, aortic smooth muscle (55-65)
  source 1..33: mol_type = other RNA
tacgtgggcgacgaggcccagagcaagagaggg

SEQ ID NO: 76346 - RNA, 33 nt, synthetic construct
  misc_feature 1..33: note = E3 ubiquitin-protein ligase HUWE1 (1115-1125)
  source 1..33: mol_type = other RNA
tacgtgggcatcgccaccctgattgctaactat

SEQ ID NO: 76347 - RNA, 30 nt, synthetic construct
  misc_feature 1..30: note = Ankyrin repeat and SAM domain-containing protein 1A (113-122)
  source 1..30: mol_type = other RNA
tacgtgcacagcttcctgtcctctggctat

SEQ ID NO: 76348 - RNA, 36 nt, synthetic construct
  misc_feature 1..36: note = Cytospin-A (477-488)
  source 1..36: mol_type = other RNA
tacgtgatcgacgaggatgtcaagagcggcagatat

SEQ ID NO: 76349 - RNA, 39 nt, synthetic construct
  misc_feature 1..39: note = Cytospin-A (477-489)
  source 1..39: mol_type = other RNA
tacgtgatcgacgaggatgtcaagagcggcagatatatg

SEQ ID NO: 76350 - RNA, 27 nt, synthetic construct
  misc_feature 1..27: note = Kelch-like protein 42 (328-336)
  source 1..27: mol_type = other RNA
tacgtgatcggcgggtataccacaaga

SEQ ID NO: 76351 - RNA, 27 nt, synthetic construct
  misc_feature 1..27: note = Lysosome-associated membraneoprotein 2 (396-404)
  source 1..27: mol_type = other RNA
tacgtgatcggcagaaggaagagctat

SEQ ID NO: 76352 - RNA, 36 nt, synthetic construct
  misc_feature 1..36: note = Lysosome-associated membraneoprotein 2 (396-407)
  source 1..36: mol_type = other RNA
tacgtgatcggcagaaggaagagctatgccgggtac

SEQ ID NO: 76353 - RNA, 33 nt, synthetic construct
  misc_feature 1..33: note = Tyrosinase (149-159)
  source 1..33: mol_type = other RNA
tacgtgatccccattggcacctatgggcagatg

SEQ ID NO: 76354 - RNA, 30 nt, synthetic construct
  misc_feature 1..30: note = Partner of Y14 and mago (5-14)
  source 1..30: mol_type = other RNA
tacgtgaccgacgagacaggcgggaagtat

SEQ ID NO: 76355 - RNA, 36 nt, synthetic construct
  misc_feature 1..36: note = Solute carrier family 25 member 33 (176-187)
  source 1..36: mol_type = other RNA
tacgtgtatcagaccgagggcatcagagggttctac

SEQ ID NO: 76356 - RNA, 30 nt, synthetic construct
  misc_feature 1..30: note = Plexin-A1 (224-233)
  source 1..30: mol_type = other RNA
tacgtgtatagcttcagatccgagcagttt

SEQ ID NO: 76357 - RNA, 27 nt, synthetic construct
  misc_feature 1..27: note = L-dopachrome tautomerase (190-198)
  source 1..27: mol_type = other RNA
tactatagcgtgagagacaccctgctc

SEQ ID NO: 76358 - RNA, 30 nt, synthetic construct
  misc_feature 1..30: note = GTPase Kras (52-61) mod
  source 1..30: mol_type = other RNA
ctgctcgacatccttgataccgccggcctg

SEQ ID NO: 76359 - RNA, 27 nt, synthetic construct
  misc_feature 1..27: note = GTPase Kras (5-13) mod
  source 1..27: mol_type = other RNA
aagctggtggtcgttggcgccggggtg

SEQ ID NO: 76360 - RNA, 30 nt, synthetic construct
  misc_feature 1..30: note = GTPase Kras (5-14) mod
  source 1..30: mol_type = other RNA
aagctggtggtcgttggcgccgctggggtg

SEQ ID NO: 76361 - RNA, 33 nt, synthetic construct
  misc_feature 1..33: note = GTPase Kras (51-61) mod
  source 1..33: mol_type = other RNA
tgcctgctcgacatccttgataccgccggcctg

SEQ ID NO: 76362 - RNA, 27 nt, synthetic construct
  misc_feature 1..27: note = GTPase Kras (51-59)
  source 1..27: mol_type = other RNA
tgcctgctcgacatccttgataccgcc

SEQ ID NO: 76363 - RNA, 27 nt, synthetic construct
  misc_feature 1..27: note = GTPase Kras (5-13) mod
  source 1..27: mol_type = other RNA
aagctggtggtcgttggcgcctgcgtg

SEQ ID NO: 76364 - RNA, 30 nt, synthetic construct
  misc_feature 1..30: note = GTPase Kras (5-14)
  source 1..30: mol_type = other RNA
aagctggtggtcgttggcgccgggggagtg

SEQ ID NO: 76365 - RNA, 30 nt, synthetic construct
  misc_feature 1..30: note = GTPase Kras (5-14) mod
  source 1..30: mol_type = other RNA
aagctggtggtcgttggcgccagcggggtg

SEQ ID NO: 76366 - RNA, 30 nt, synthetic construct
  misc_feature 1..30: note = GTPase Kras (5-14) mod
  source 1..30: mol_type = other RNA
aagctggtggtcgttggcgccgacggggtg

SEQ ID NO: 76367 - RNA, 30 nt, synthetic construct
  misc_feature 1..30: note = GTPase Kras (5-14) mod
  source 1..30: mol_type = other RNA
aagctggtggtcgttggcgcctgcggggtg

SEQ ID NO: 76368 - RNA, 27 nt, synthetic construct
  misc_feature 1..27: note = GTPase Kras (1-9)
  source 1..27: mol_type = other RNA
atgaccgagtacaagctggtggtcgtt

SEQ ID NO: 76369 - RNA, 30 nt, synthetic construct
  misc_feature 1..30: note = GTPase Kras (5-14) mod
  source 1..30: mol_type = other RNA
aagctggtggtcgttggcgccgtgggggta

SEQ ID NO: 76370 - RNA, 96 nt, synthetic construct
  misc_feature 1..96: note = GTPase Kras (1-33) mod
  source 1..96: mol_type = other RNA
atgaccgagtacaagctggtggtcgttggcgccgctggggtgggaaaaagcgcactcacaatccagcttattcaaaaccacttcgtagacgaatat

SEQ ID NO: 76371 - RNA, 96 nt, synthetic construct
  misc_feature 1..96: note = GTPase Kras (1-33) mod
  source 1..96: mol_type = other RNA
atgaccgagtacaagctggtggtcgttggcgccagcggggtgggaaaatccgctctcacaatccagcttattcaaaaccacttcgtagacgaatat

SEQ ID NO: 76372 - RNA, 96 nt, synthetic construct
  misc_feature 1..96: note = GTPase Kras (1-33) mod
  source 1..96: mol_type = other RNA
atgaccgagtacaagctggtggtcgttggcgccggggacgtgggaaaaagcgctctcacaatccagcttattcaaaaccacttcgtagatgaatat

SEQ ID NO: 76373 - RNA, 75 nt, synthetic construct
  misc_feature 1..75: note = GTPase Kras (1-26) mod
  source 1..75: mol_type = other RNA
atgaccgagtacaacctggtggtcgttggcgccgggggagtgggtaagagcgctctcacaatccagcttattcaa

SEQ ID NO: 76374 - RNA, 123 nt, synthetic construct
  misc_feature 1..123: note = GTPase Kras mod (3-43)
  source 1..123: mol_type = other RNA
agctacagaaagcaggtggtcatcgacggcgagacctgcctgctcgatattcttgacacaactgggcaagaagagtattccgccatgagggatcagtacatgcggacgggagaaggtttcctg

SEQ ID NO: 76375 - RNA, 27 nt, synthetic construct
  misc_feature 1..27: note = BRAF (597-605) V600E
  source 1..27: mol_type = other RNA
ctggccaccgagaagagcagatggtcc

SEQ ID NO: 76376 - RNA, 30 nt, synthetic construct
  misc_feature 1..30: note = BRAF (597-606) V600E
  source 1..30: mol_type = other RNA
ctggccaccgagaagagcagatggtccggc

SEQ ID NO: 76377 - RNA, 30 nt, synthetic construct
  misc_feature 1..30: note = BRAF(597-606) V600M
  source 1..30: mol_type = other RNA
ctggccaccatgaagagcagatggtccggc

SEQ ID NO: 76378 - RNA, 27 nt, synthetic construct
  misc_feature 1..27: note = p53 wt (65-73)
  source 1..27: mol_type = other RNA
agaatgcccgaggccgctcctccagtg

SEQ ID NO: 76379 - RNA, 27 nt, synthetic construct
  misc_feature 1..27: note = p53 wt (149-157)
  source 1..27: mol_type = other RNA
agcaccccccctccaggcacaagagtg

SEQ ID NO: 76380 - RNA, 33 nt, synthetic construct; identical to SEQ ID NO: 52233
  misc_feature 1..33: note = p53 wt (187-197)
  source 1..33: mol_type = other RNA

SEQ ID NO: 76381 - RNA, 27 nt, synthetic construct
  misc_feature 1..27: note = p53 wt (217-225)
  source 1..27: mol_type = other RNA
gtggtcccctacgagcctccagaagtt

SEQ ID NO: 76382 - RNA, 27 nt, synthetic construct
  misc_feature 1..27: note = p53 wt (264-272)
  source 1..27: mol_type = other RNA
ctgctcggcagaaacagcttcgaggtg

SEQ ID NO: 76383 - RNA, 27 nt, synthetic construct
  misc_feature 1..27: note = p53 wt (125134)
  source 1..27: mol_type = other RNA
acctaccccgccctgaacaagatgttc

SEQ ID NO: 76384 - RNA, 27 nt, synthetic construct
  misc_feature 1..27: note = p53 wt (161169)
  source 1..27: mol_type = other RNA
gccatctacaagcagagccaacacatg

SEQ ID NO: 76385 - RNA, 27 nt, synthetic construct
  misc_feature 1..27: note = p53 wt (204212)
  source 1..27: mol_type = other RNA
gagtacctggacgatagaaacaccttc

SEQ ID NO: 76386 - RNA, 42 nt, synthetic construct
  misc_feature 1..42: note = p53 wt (108-122)
  source 1..42: mol_type = other RNA
ggcttcagactggggtttctccacagcggaaccgcctccgtg

SEQ ID NO: 76387 - RNA, 42 nt, synthetic construct
  misc_feature 1..42: note = p53 wt (110-124)
  source 1..42: mol_type = other RNA
agactgggcttcctccacagcgggaccgcctccgtgacatgc

SEQ ID NO: 76388 - RNA, 39 nt, synthetic construct
  misc_feature 1..39: note = p53 wt (25-35)
  source 1..39: mol_type = other RNA
ctgtggaagctccttcccgagaacaatgtgctgagccct

SEQ ID NO: 76389 - RNA, 45 nt, synthetic construct
  misc_feature 1..45: note = p53 wt (108-122)
  source 1..45: mol_type = other RNA
ggcttcagactggggtttctccacagcggaaccgccaagtccgtg

SEQ ID NO: 76390 - RNA, 42 nt, synthetic construct
  misc_feature 1..42: note = p53 wt (153-166)
  source 1..42: mol_type = other RNA
cccggcaccagagtgagggccatggctatctacaagcagagc

SEQ ID NO: 76391 - RNA, 123 nt, synthetic construct
  misc_feature 1..123: note = BRAF (442-482)
  source 1..123: mol_type = other RNA
ggcagaagggacagctccgatgactgggagatccccgatgggcagattaccgtgggacaaataatcggttctggctcattcgggacagtctacaagggaaaatggcacggcgacgttgccgtg

SEQ ID NO: 76392 - RNA, 123 nt, synthetic construct
  misc_feature 1..123: note = BRAF (443-483)
  source 1..123: mol_type = other RNA
agaagggacagctccgatgactgggagatccccgatggccagattaccgtggggcaacggtctggatcaggtagtttcggcacagtctacaaggggaaatggcacggagacgttgccgtgaag

SEQ ID NO: 76393 - RNA, 123 nt, synthetic construct
  misc_feature 1..123: note = BRAF (444-484)
  source 1..123: mol_type = other RNA
agagacagctccgatgactgggagatccccgatggccagattaccgtggggcaaaggatagaatctggatcattcggtacagtctacaagggcaaatggcacggggacgttgccgtgaagatg

SEQ ID NO: 76394 - RNA, 123 nt, synthetic construct
  misc_feature 1..123: note = BRAF (581-621)
  source 1..123: mol_type = other RNA
aacatcttcctgcacgaggacctcaccgtgaagattggcgattttgggcttgccacagtcgaaagcagatggtccggatctcatcagttcgagcaactgtcaggtagtatattgtggatggct

SEQ ID NO: 76395 - RNA, 123 nt, synthetic construct
  misc_feature 1..123: note = BRAF (446-486)
  source 1..123: mol_type = other RNA
agctccgacgattgggagatccccgacggccagattaccgtggggcaaagaataggatctgtctcattcggtacagtttacaagggcaaatggcacggggatgtggccgtaaagatgctgaac

SEQ ID NO: 76396 - RNA, 123 nt, synthetic construct
  misc_feature 1..123: note = BRAF (577-617)
  source 1..123: mol_type = other RNA
ctgaagagcaacaatatcttcctccacgaggaccttaccgtgaaaattggcgattttgggagagccacagtcaagtccaggtggtctggatcacatcagttcgaacaactgagtggtagcata

SEQ ID NO: 76397 - RNA, 123 nt, synthetic construct
  misc_feature 1..123: note = BRAF (449-489)
  source 1..123: mol_type = other RNA
gactgggagatccccgatggccagattaccgtggggcaaagaataggaagcggttccttcgccacagtctacaagggcaaatggcacggggacgttgctgtgaagatgctgaacgtaactgca

SEQ ID NO: 76398 - RNA, 123 nt, synthetic construct
  misc_feature 1..123: note = BRAF (449-489)
  source 1..123: mol_type = other RNA
gactgggagatccccgatggccagattaccgtggggcaaagaataggaagcggttccttcaggacagtctacaagggcaaatggcacggggacgttgccgtgaagatgctgaacgtaactgct

SEQ ID NO: 76399 - RNA, 123 nt, synthetic construct
  misc_feature 1..123: note = BRAF (574-614)
  source 1..123: mol_type = other RNA
cacagagacctgaagagcaacaatatcttcctccatgaggatcttaccgtgaaaattggcgggtttggactggccacagtcaagtccaggtggtctggttcacaccagttcgaacaattgagt

SEQ ID NO: 76400 - protein, 9 aa, synthetic construct
  REGION 1..9: note = Linker 1
SGGSGGSGG

SEQ ID NO: 76401-76402 - skipped (2 entries)

SEQ ID NO: 76403 - protein, 10 aa, synthetic construct
  REGION 1..10: note = Linker 4
GGGGSGGGGT

SEQ ID NO: 76404 - protein, 9 aa, synthetic construct
  REGION 1..9: note = Linker 5
GGGGSGGGG

SEQ ID NO: 76405 - protein, 4 aa, synthetic construct
  REGION 1..4: note = Linker 6
GPSL

SEQ ID NO: 76406 - protein, 8 aa, synthetic construct
  REGION 1..8: note = Linker 7
GSTVAAPS

SEQ ID NO: 76407 - protein, 8 aa, synthetic construct
  REGION 1..8: note = Linker 8
TVAAPSGS

SEQ ID NO: 76408 - protein, 10 aa, synthetic construct
  REGION 1..10: note = Linker 9
GSTVAAPSGS

SEQ ID NO: 76409 - protein, 5 aa, synthetic construct
  REGION 1..5: note = Linker 10
GGGGS

SEQ ID NO: 76410 - protein, 6 aa, synthetic construct
  REGION 1..6: note = Linker 11
TVAAPS

SEQ ID NO: 76411-76412 - skipped (2 entries)

SEQ ID NO: 76413 - protein, 6 aa, synthetic construct
  REGION 1..6: note = Linker 14
PAVPPP

SEQ ID NO: 76414 - protein, 6 aa, synthetic construct
  REGION 1..6: note = Linker 15
TVSDVP

SEQ ID NO: 76415 - protein, 6 aa, synthetic construct
  REGION 1..6: note = Linker 16
TGLDSP

SEQ ID NO: 76416 - protein, 11 aa, synthetic construct
  REGION 1..11: note = Linker 17
HYGAEALERAG

SEQ ID NO: 76417 - skipped

SEQ ID NO: 76418 - protein, 4 aa, synthetic construct
  REGION 1..4: note = Linker 19
AAAA

SEQ ID NO: 76419 - protein, 15 aa, synthetic construct
  REGION 1..15: note = CV Linker
GGGGSGGGGSGGGGS

SEQ ID NO: 76420 - protein, 9 aa, synthetic construct
  REGION 1..9: note = Prostate-specific antigen precursor (17-25)
AAPLILSRI

SEQ ID NO: 76421 - protein, 9 aa, synthetic construct
  REGION 1..9: note = Prostate-specific antigen precursor (65-73)
HCIRNKSVI

SEQ ID NO: 76422 - protein, 10 aa, synthetic construct
  REGION 1..10: note = Prostate-specific antigen precursor (65-74)
HCIRNKSVIL

SEQ ID NO: 76423 - protein, 9 aa, synthetic construct
  REGION 1..9: note = Prostate-specific antigen precursor (82-90)
HPEDTGQVF

SEQ ID NO: 76424 - protein, 9 aa, synthetic construct
  REGION 1..9: note = Prostate-specific antigen precursor (188-196)
HPQKVTKFM

SEQ ID NO: 76425 - protein, 9 aa, synthetic construct
  REGION 1..9: note = Prostate-specific antigen precursor (243-251)
YTKVVHYRK

SEQ ID NO: 76426 - protein, 10 aa, synthetic construct
  REGION 1..10: note = Prostate-specific antigen precursor (178-187)
VISNDVCAQV

SEQ ID NO: 76427 - protein, 15 aa, synthetic construct
  REGION 1..15: note = Prostate-specific antigen precursor (88-102)
QVFQVSHSFPHPLYD

SEQ ID NO: 76428 - protein, 9 aa, synthetic construct
  REGION 1..9: note = Kita-kyushu lung cancer antigen 1 (40-48)
LVRPSSSGL

SEQ ID NO: 76429 - protein, 11 aa, synthetic construct
  REGION 1..11: note = Trophoblast glycoprotein (104-114)
AVLPAGAFARR

SEQ ID NO: 76430 - protein, 9 aa, synthetic construct
  REGION 1..9: note = Trophoblast glycoprotein (33-41)
SPTSSASSF

SEQ ID NO: 76431 - protein, 9 aa, synthetic construct
  REGION 1..9: note = Cyclin-dependent kinase inhibitor 2A (68-76)
AEELGHRDV

SEQ ID NO: 76432 - protein, 10 aa, synthetic construct
  REGION 1..10: note = Cyclin-dependent kinase inhibitor 2A, isoforms 1/2/3 (87-96)
REGFLDTLVV

SEQ ID NO: 76433 - protein, 11 aa, synthetic construct
  REGION 1..11: note = Cyclin-dependent kinase inhibitor 2A, isoforms 1/2/3 (87-97)
REGFLDTLVVL

SEQ ID NO: 76434 - protein, 9 aa, synthetic construct
  REGION 1..9: note = multiple tumor suppressor 1/cyclin-dependent kinase 4 inhibitor p16, partial (7-15)
ARVAELLLL

SEQ ID NO: 76435 - protein, 9 aa, synthetic construct
  REGION 1..9: note = multiple tumor suppressor 1/cyclin-dependent kinase 4 inhibitor p16, partial (52-60)
ARLDVRDAW

SEQ ID NO: 76436 - protein, 9 aa, synthetic construct
  REGION 1..9: note = multiple tumor suppressor 1/cyclin-dependent kinase 4 inhibitor p16, partial (63-71)
LPVDLAEEL

SEQ ID NO: 76437 - protein, 13 aa, synthetic construct
  REGION 1..13: note = Cyclin-dependent kinase inhibitor 2A, isoforms 1/2/3 (111-123)
GRLPVDLAEELGH

SEQ ID NO: 76438 - protein, 9 aa, synthetic construct
  REGION 1..9: note = Cyclin-dependent kinase inhibitor 2A (58-66)
RVAELLLLH

SEQ ID NO: 76439 - protein, 10 aa, synthetic construct
  REGION 1..10: note = GTPase NRas (55-64)
ILDTAGQEEY

SEQ ID NO: 76440 - protein, 766 aa, synthetic construct [sequence omitted]

SEQ ID NO: 76441 - protein, 1068 aa, synthetic construct
  REGION 1..1068: note = P42336 PK3CA
MPPRPSSGELWGIHLMPPRILVECLLPNGMIVTLECLREATLITIKHELFKEARKYPLHQLLQDESSYIFVSVTQEAEREEFFDETRRLCDLRLFQPFLKVIEPVGNREEKILNREIGFAIGMPVCEFDMVKDPEVQDFRRNILNVCKEAVDLRDLNSPHSRAMYVYPPNVESSPELPKHIYNKLDKGQIIVVIWVIVSPNNDKQKYTLKINHDCVPEQVIAEAIRKKTRSMLLSSEQLKLCVLEYQGKYILKVCGCDEYFLEKYPLSQYKYIRSCIMLGRMPNLMLMAKESLYSQLPMDCFTMPSYSRRISTATPYMNGETSTKSLWVINSALRIKILCATYVNVNIRDIDKIYVRTGIYHGGEPLCDNVNTQRVPCSNPRWNEWLNYDIYIPDLPRAARLCLSICSVKGRKGAKEEHCPLAWGNINLFDYTDTLVSGKMALNLWPVPHGLEDLLNPIGVTGSNPNKETPCLELEFDWFSSVVKFPDMSVIEEHANWSVSREAGFSYSHAGLSNRLARDNELRENDKEQLKAISTRDPLSEITEQEKDFLWSHRHYCVTIPEILPKLLLSVKWNSRDEVAQMYCLVKDWPPIKPEQAMELLDCNYPDPMVRGFAVRCLEKYLTDDKLSQYLIQLVQVLKYEQYLDNLLVRFLLKKALTNQRIGHFFFWHLKSEMHNKTVSQRFGLLLESYCRACGMYLKHLNRQVEAMEKLINLTDILKQEKKDETQKVQMKFLVEQMRRPDFMDALQGFLSPLNPAHQLGNLRLEECRIMSSAKRPLWLNWENPDIMSELLFQNNEIIFKNGDDLRQDMLTLQIIRIMENIWQNQGLDLRMLPYGCLSIGDCVGLIEVVRNSHTIMQIQCKGGLKGALQFNSHTLHQWLKDKNKGEIYDAAIDLFTRSCAGYCVATFILGIGDRHNSNIMVKDDGQLFHIDFGHFLDHKKKKFGYKRERVPFVLTQDFLIVISKGAQECTKTREFERFQEMCYKAYLAIRQHANLFINLFSMMLGSGMPELQSFDDIAYIRKTLALDKTEQEALEYFMKQMNDAHHGGWTTKMDWIFHTIKQHALN

SEQ ID NO: 76442 - protein, 189 aa, synthetic construct [sequence omitted]

SEQ ID NO: 76443 - protein, 414 aa, synthetic construct
  REGION 1..414: note = O75874 IDHC
MSKKISGGSVVEMQGDEMTRIIWELIKEKLIFPYVELDLHSYDLGIENRDATNDQVTKDAAEAIKKHNVGVKCATITPDEKRVEEFKLKQMWKSPNGTIRNILGGTVFREAIICKNIPRLVSGWVKPIIIGRHAYGDQYRATDFVVPGPGKVEITYTPSDGTQKVTYLVHNFEEGGGVAMGMYNQDKSIEDFAHSSFQMALSKGWPLYLSTKNTILKKYDGRFKDIFQEIYDKQYKSQFEAQKIWYEHRLIDDMVAQAMKSEGGFIWACKNYDGDVQSDSVAQGYGSLGMMTSVLVCPDGKTVEAEAAHGTVTRHYRMYQKGQETSTNPIASIFAWTRGLAHRAKLDNNKELAFFANALEEVSIETIEAGFMTKDLAACIKGLPNVQRSDYLNTFEFMDKLGENLKIKLAQAKL

SEQ ID NO: 76444 - protein, 393 aa, synthetic construct [sequence omitted]

SEQ ID NO: 76445 - protein, 189 aa, synthetic construct
  REGION 1..189: note = P01111 RASN
MTEYKLVVVGAGGVGKSALTIQLIQNHFVDEYDPTIEDSYRKQVVIDGETCLLDILDTAGQEEYSAMRDQYMRTGEGFLCVFAINNSKSFADINLYREQIKRVKDSDDVPMVLVGNKCDLPTRTVDTKQAHELAKSYGIPFIETSAKTRQGVEDAFYTLVREIRQYRMKKLNSSDDGTQGCMGLPCVVM

SEQ ID NO: 76446 - protein, 480 aa, synthetic construct [sequence omitted]

SEQ ID NO: 76447 - protein, 1304 aa, synthetic construct
  REGION 1..1304: note = O75533 SF3B1
MAKIAKTHEDIEAQIREIQGKKAALDEAQGVGLDSTGYYDQEIYGGSDSRFAGYVTSIAATELEDDDDDYSSSTSLLGQKKPGYHAPVALLNDIPQSTEQYDPFAEHRPPKIADREDEYKKHRRTMIISPERLDPFADGGKTPDPKMNARTYMDVMREQHLTKEEREIRQQLAEKAKAGELKVVNGAAASQPPSKRKRRWDQTADQTPGATPKKLSSWDQAETPGHTPSLRWDETPGRAKGSETPGATPGSKIWDPTPSHTPAGAATPGRGDTPGHATPGHGGATSSARKNRWDETPKTERDTPGHGSGWAETPRTDRGGDSIGETPTPGASKRKSRWDETPASQMGGSTPVLTPGKTPIGTPAMNMATPTPGHIMSMTPEQLQAWRWEREIDERNRPLSDEELDAMFPEGYKVLPPPAGYVPIRTPARKLTATPTPLGGMTGFHMQTEDRTMKSVNDQPSGNLPFLKPDDIQYFDKLLVDVDESTLSPEEQKERKIMKLLLKIKNGTPPMRKAALRQITDKAREFGAGPLFNQILPLLMSPTLEDQERHLLVKVIDRILYKLDDLVRPYVHKILVVIEPLLIDEDYYARVEGREIISNLAKAAGLATMISTMRPDIDNMDEYVRNTTARAFAVVASALGIPSLLPFLKAVCKSKKSWQARHTGIKIVQQIAILMGCAILPHLRSLVEIIEHGLVDEQQKVRTISALAIAALAEAATPYGIESFDSVLKPLWKGIRQHRGKGLAAFLKAIGYLIPLMDAEYANYYTREVMLILIREFQSPDEEMKKIVLKVVKQCCGTDGVEANYIKTEILPPFFKHFWQHRMALDRRNYRQLVDTTVELANKVGAAEIISRIVDDLKDEAEQYRKMVMETIEKIMGNLGAADIDHKLEEQLIDGILYAFQEQTTEDSVMLNGFGTVVNALGKRVKPYLPQICGTVLWRLNNKSAKVRQQAADLISRTAVVMKTCQEEKLMGHLGVVLYEYLGEEYPEVLGSILGALKAIVNVIGMHKMTPPIKDLLPRLTPILKNRHEKVQENCIDLVGRIADRGAEYVSAREWMRICFELLELLKAHKKAIRRATVNTFGYIAKAIGPHDVLATLLNNLKVQERQNRVCTTVAIAIVAETCSPFTVLPALMNEYRVPELNVQNGVLKSLSFLFEYIGEMGKDYIYAVTPLLEDALMDRDLVHRQTASAVVQHMSLGVYGFGCEDSLNHLLNYVWPNVFETSPHVIQAVMGALEGLRVAIGPCRMLQYCLQGLFHPARKVRDVYWKIYNSIYIGSQDALIAHYPRIYNDDKNTYIRYELDYIL

SEQ ID NO: 76448 - protein, 156 aa, synthetic construct
  REGION 1..156: note = P42771 CDN2A
MEPAAGSSMEPSADWLATAAARGRVEEVRALLEAGALPNAPNSYGRRPIQVMMMGSARVAELLLLHGAEPNCADPATLTRPVHDAAREGFLDTLVVLHRAGARLDVRDAWGRLPVDLAEELGHRDVARYLRAAAGGTRGSNHARIDAAEGPSDIPD

SEQ ID NO: 76449 - protein, 1210 aa, synthetic construct [sequence omitted]

SEQ ID NO: 76450 - protein, 180 aa, synthetic construct
  REGION 1..180: note = P78358 CTG1B
MQAEGRGTGGSTGDADGPGGPGIPDGPGGNAGGPGEAGATGGRGPRGAGAARASGPGGGAPRGPHGGAASGLNGCCRCGARGPESRLLEFYLAMPFATPMEAELARRSLAQDAPPLPVPGVLLKEFTVSGNILTIRLTAADHRQLQLSISSCLQQLSLLMWITQCFLPVFLAQPPSGQRR

SEQ ID NO: 76451 - protein, 1255 aa, synthetic construct
  REGION 1..1255: note = P15941 MUC1
MTPGTQSPFFLLLLLTVLTVVTGSGHASSTPGGEKETSATQRSSVPSSTEKNAVSMTSSVLSSHSPGSGSSTTQGQDVTLAPATEPASGSAATWGQDVTSVPVTRPALGSTTPPAHDVTSAPDNKPAPGSTAPPAHGVTSAPDTRPAPGSTAPPAHGVTSAPDTRPAPGSTAPPAHGVTSAPDTRPAPGSTAPPAHGVTSAPDTRPAPGSTAPPAHGVTSAPDTRPAPGSTAPPAHGVTSAPDTRPAPGSTAPPAHGVTSAPDTRPAPGSTAPPAHGVTSAPDTRPAPGSTAPPAHGVTSAPDTRPAPGSTAPPAHGVTSAPDTRPAPGSTAPPAHGVTSAPDTRPAPGSTAPPAHGVTSAPDTRPAPGSTAPPAHGVTSAPDTRPAPGSTAPPAHGVTSAPDTRPAPGSTAPPAHGVTSAPDTRPAPGSTAPPAHGVTSAPDTRPAPGSTAPPAHGVTSAPDTRPAPGSTAPPAHGVTSAPDTRPAPGSTAPPAHGVTSAPDTRPAPGSTAPPAHGVTSAPDTRPAPGSTAPPAHGVTSAPDTRPAPGSTAPPAHGVTSAPDTRPAPGSTAPPAHGVTSAPDTRPAPGSTAPPAHGVTSAPDTRPAPGSTAPPAHGVTSAPDTRPAPGSTAPPAHGVTSAPDTRPAPGSTAPPAHGVTSAPDTRPAPGSTAPPAHGVTSAPDTRPAPGSTAPPAHGVTSAPDTRPAPGSTAPPAHGVTSAPDTRPAPGSTAPPAHGVTSAPDTRPAPGSTAPPAHGVTSAPDTRPAPGSTAPPAHGVTSAPDTRPAPGSTAPPAHGVTSAPDTRPAPGSTAPPAHGVTSAPDTRPAPGSTAPPAHGVTSAPDTRPAPGSTAPPAHGVTSAPDTRPAPGSTAPPAHGVTSAPDTRPAPGSTAPPAHGVTSAPDTRPAPGSTAPPAHGVTSAPDTRPAPGSTAPPAHGVTSAPDNRPALGSTAPPVHNVTSASGSASGSASTLVHNGTSARATTTPASKSTPFSIPSHHSDTPTTLASHSTKTDASSTHHSSVPPLTSSNHSTSPQLSTGVSFFFLSFHISNLQFNSSLEDPSTDYYQELQRDISEMFLQIYKQGGFLGLSNIKFRPGSVVVQLTLAFREGTINVHDVETQFNQYKTEAASRYNLTISDVSVSDVPFPFSAQSGAGVPGWGIALLVLVCVLVALAIVYLIALAVCQCRRKNYGQLDIFPARDTYHPMSEYPTYHTHGRYVPPSSTDRSPYEKVSAGNGGSSLSYTNPAVAATSANL

SEQ ID NO: 76452 - protein, 420 aa, synthetic construct
  REGION 1..420: note = Q13641 TPBG
MPGGCSRGPAAGDGRLRLARLALVLLGWVSSSSPTSSASSFSSSAPFLASAVSAQPPLPDQCPALCECSEAARTVKCVNRNLTEVPTDLPAYVRNLFLTGNQLAVLPAGAFARRPPLAELAALNLSGSRLDEVRAGAFEHLPSLRQLDLSHNPLADLSPFAFSGSNASVSAPSPLVELILNHIVPPEDERQNRSFEGMVVAALLAGRALQGLRRLELASNHFLYLPRDVLAQLPSLRHLDLSNNSLVSLTYVSFRNLTHLESLHLEDNALKVLHNGTLAELQGLPHIRVFLDNNPWVCDCHMADMVTWLKETEVVQGKDRLTCAYPEKMRNRVLLELNSADLDCDPILPPSLQTSYVFLGIVLALIGAIFLLVLYLNRKGIKKWMHNIRDACRDHMEGYHYRYEINADPRLTNLSSNSDV

SEQ ID NO: 76453 - protein, 1255 aa, synthetic construct [sequence omitted]

SEQ ID NO: 76454 - protein, 314 aa, synthetic construct
  REGION 1..314: note = P43357 MAGA3
MPLEQRSQHCKPEEGLEARGEALGLVGAQAPATEEQEAASSSSTLVEVTLGEVPAAESPDPPQSPQGASSLPTTMNYPLWSQSYEDSSNQEEEGPSTFPDLESEFQAALSRKVAELVHFLLLKYRAREPVTKAEMLGSVVGNWQYFFPVIFSKASSSLQLVFGIELMEVDPIGHLYIFATCLGLSYDGLLGDNQIMPKAGLLIIVLAIIAREGDCAPEEKIWEELSVLEVFEGREDSILGDPKKLLTQHFVQENYLEYRQVPGSDPACYEFLWGPRALVETSYVKVLHHMVKISGGPHISYPPLHEWVLREGEE

SEQ ID NO: 76455 - protein, 165 aa, synthetic construct
  REGION 1..165: note = Q17RY6 LY6K
MALLALLLVVALPRVWTDANLTARQRDPEDSQRTDEGDNRVWCHVCERENTFECQNPRRCKWTEPYCVIAAVKIFPRFFMVAKQCSAGCAAMERPKPEEKRFLLEEPMPFFYLKCCKIRYCNLEGPPINSSVFKEYAGSMGESCGGLWLAILLLLASIAAGLSLS

SEQ ID NO: 76456 - protein, 344 aa, synthetic construct
  REGION 1..344: note = P40199 CEAM6
MGPPSAPPCRLHVPWKEVLLTASLLTFWNPPTTAKLTIESTPFNVAEGKEVLLLAHNLPQNRIGYSWYKGERVDGNSLIVGYVIGTQQATPGPAYSGRETIYPNASLLIQNVTQNDTGFYTLQVIKSDLVNEEATGQFHVYPELPKPSISSNNSNPVEDKDAVAFTCEPEVQNTTYLWWVNGQSLPVSPRLQLSNGNMTLTLLSVKRNDAGSYECEIQNPASANRSDPVTLNVLYGPDGPTISPSKANYRPGENLNLSCHAASNPPAQYSWFINGTFQQSTQELFIPNITVNNSGSYMCQAHNSATGLNRTTVTMITVSGSAPVLSAVATVGITIGVLARVALI

SEQ ID NO: 76457 - protein, 449 aa, synthetic construct
  REGION 1..449: note = P19544 WT1
MGSDVRDLNALLPAVPSLGGGGGCALPVSGAAQWAPVLDFAPPGASAYGSLGGPAPPPAPPPPPPPPPHSFIKQEPSWGGAEPHEEQCLSAFTVHFSGQFTGTAGACRYGPFGPPPPSQASSGQARMFPNAPYLPSCLESQPAIRNQGYSTVTFDGTPSYGHTPSHHAAQFPNHSFKHEDPMGQQGSLGEQQYSVPPPVYGCHTPTDSCTGSQALLLRTPYSSDNLYQMTSQLECMTWNQMNLGATLKGVAAGSSSSVKWTEGQSNHSTGYESDNHTTPILCGAQYRIHTHGVFRGIQDVRRVPGVAPTLVRSASETSEKRPFMCAYPGCNKRYFKLSHLQMHSRKHTGEKPYQCDFKDCERRFSRSDQLKRHQRRHTGVKPFQCKTCQRKFSRSDHLKTHTRTHTGKTSEKPFSCRWPSCQKKFARSDELVRHHNMHQRNMTKLQLAL

SEQ ID NO: 76458 - protein, 702 aa, synthetic construct
  REGION 1..702: note = P06731 CEAM5
MESPSAPPHRWCIPWQRLLLTASLLTFWNPPTTAKLTIESTPFNVAEGKEVLLLVHNLPQHLFGYSWYKGERVDGNRQIIGYVIGTQQATPGPAYSGREIIYPNASLLIQNIIQNDTGFYTLHVIKSDLVNEEATGQFRVYPELPKPSISSNNSKPVEDKDAVAFTCEPETQDATYLWWVNNQSLPVSPRLQLSNGNRTLTLFNVTRNDTASYKCETQNPVSARRSDSVILNVLYGPDAPTISPLNTSYRSGENLNLSCHAASNPPAQYSWFVNGTFQQSTQELFIPNITVNNSGSYTCQAHNSDTGLNRTTVTTITVYAEPPKPFITSNNSNPVEDEDAVALTCEPEIQNTTYLWWVNNQSLPVSPRLQLSNDNRTLTLLSVTRNDVGPYECGIQNKLSVDHSDPVILNVLYGPDDPTISPSYTYYRPGVNLSLSCHAASNPPAQYSWLIDGNIQQHTQELFISNITEKNSGLYTCQANNSASGHSRTTVKTITVSAELPKPSISSNNSKPVEDKDAVAFTCEPEAQNTTYLWWVNGQSLPVSPRLQLSNGNRTLTLFNVTRNDARAYVCGIQNSVSANRSDPVTLDVLYGPDTPIISPPDSSYLSGANLNLSCHSASNPSPQYSWRINGIPQQHTQVLFIAKITPNNNGTYACFVSNLATGRNNSIVKSITVSASGTSPGLSAGATVGIMIGVLVGVALI

SEQ ID NO: 76459 - protein, 725 aa, synthetic construct
  REGION 1..725: note = Q99661 KIF2C
MAMDSSLQARLFPGLAIKIQRSNGLIHSANVRTVNLEKSCVSVEWAEGGATKGKEIDFDDVAAINPELLQLLPLHPKDNLPLQENVTIQKQKRRSVNSKIPAPKESLRSRSTRMSTVSELRITAQENDMEVELPAAANSRKQFSVPPAPTRPSCPAVAEIPLRMVSEEMEEQVHSIRGSSSANPVNSVRRKSCLVKEVEKMKNKREEKKAQNSEMRMKRAQEYDSSFPNWEFARMIKEFRATLECHPLTMTDPIEEHRICVCVRKRPLNKQELAKKEIDVISIPSKCLLLVHEPKLKVDLTKYLENQAFCFDFAFDETASNEVVYRFTARPLVQTIFEGGKATCFAYGQTGSGKTHTMGGDLSGKAQNASKGIYAMASRDVFLLKNQPCYRKLGLEVYVTFFEIYNGKLFDLLNKKAKLRVLEDGKQQVQVVGLQEHLVNSADDVIKMIDMGSACRTSGQTFANSNSSRSHACFQIILRAKGRMHGKFSLVDLAGNERGADTSSADRQTRMEGAEINKSLLALKECIRALGQNKAHTPFRESKLTQVLRDSFIGENSRTCMIATISPGISSCEYTLNTLRYADRVKELSPHSGPSGEQLIQMETEEMEACSNGALIPGNLSKEEEELSSQMSSFNEAMTQIRELEEKAMEELKEIIQQGPDWLELSEMTEQPDYDLETFVNKAESALAQQAKHFSALRDVIKALRLAMQLEEQASRQISSKKRPQ

SEQ ID NO: 76460 - protein, 113 aa, synthetic construct
  REGION 1..113: note = Q5H943 KKLC1
MNFYLLLASSILCALIVFWKYRRFQRNTGEMSSNSTALALVRPSSSGLINSNTDNNLAVYDLSRDILNNFPHSIARQKRILVNLSMVENKLVELEHTLLSKGFRGASPHRKST

SEQ ID NO: 76461 - protein, 101 aa, synthetic construct
  REGION 1..101: note = P01350 GAST
MQRLCVYVLIFALALAAFSEASWKPRSQQPDAPLGTGANRDLELPWLEQQGPASHHRRQLGPQGPPHLVADPSKKQGPWLEEEEEAYGWMDFGRRSAEDEN

SEQ ID NO: 76462 - protein, 1356 aa, synthetic construct
  REGION 1..1356: note = P35968 VGFR2
MQSKVLLAVALWLCVETRAASVGLPSVSLDLPRLSIQKDILTIKANTTLQITCRGQRDLDWLWPNNQSGSEQRVEVTECSDGLFCKTLTIPKVIGNDTGAYKCFYRETDLASVIYVYVQDYRSPFIASVSDQHGVVYITENKNKTVVIPCLGSISNLNVSLCARYPEKRFVPDGNRISWDSKKGFTIPSYMISYAGMVFCEAKINDESYQSIMYIVVVVGYRIYDVVLSPSHGIELSVGEKLVLNCTARTELNVGIDFNWEYPSSKHQHKKLVNRDLKTQSGSEMKKFLSTLTIDGVTRSDQGLYTCAASSGLMTKKNSTFVRVHEKPFVAFGSGMESLVEATVGERVRIPAKYLGYPPPEIKWYKNGIPLESNHTIKAGHVLTIMEVSERDTGNYTVILTNPISKEKQSHVVSLVVYVPPQIGEKSLISPVDSYQYGTTQTLTCTVYAIPPPHHIHWYWQLEEECANEPSQAVSVTNPYPCEEWRSVEDFQGGNKIEVNKNQFALIEGKNKTVSTLVIQAANVSALYKCEAVNKVGRGERVISFHVTRGPEITLQPDMQPTEQESVSLWCTADRSTFENLTWYKLGPQPLPIHVGELPTPVCKNLDTLWKLNATMFSNSTNDILIMELKNASLQDQGDYVCLAQDRKTKKRHCVVRQLTVLERVAPTITGNLENQTTSIGESIEVSCTASGNPPPQIMWFKDNETLVEDSGIVLKDGNRNLTIRRVRKEDEGLYTCQACSVLGCAKVEAFFIIEGAQEKTNLEIIILVGTAVIAMFFWLLLVIILRTVKRANGGELKTGYLSIVMDPDELPLDEHCERLPYDASKWEFPRDRLKLGKPLGRGAFGQVIEADAFGIDKTATCRTVAVKMLKEGATHSEHRALMSELKILIHIGHHLNVVNLLGACTKPGGPLMVIVEFCKFGNLSTYLRSKRNEFVPYKTKGARFRQGKDYVGAIPVDLKRRLDSITSSQSSASSGFVEEKSLSDVEEEEAPEDLYKDFLTLEHLICYSFQVAKGMEFLASRKCIHRDLAARNILLSEKNVVKICDFGLARDIYKDPDYVRKGDARLPLKWMAPETIFDRVYTIQSDVWSFGVLLWEIFSLGASPYPGVKIDEEFCRRLKEGTRMRAPDYTTPEMYQTMLDCWHGEPSQRPTFSELVEHLGNLLQANAQQDGKDYIVLPISETLSMEEDSGLSLPTSPVSCMEEEEVCDPKFHYDNTAGISQYLQNSKRKSRPVSVKTFEDIPLEEPEVKVIPDDNQTDSGMVLASEELKTLEDRTKLSPSFGGMVPSKSRESVASEGSNQTSGYQSGYHSDDTDTTVYSSEEAELLKLIEIGVQTGSTAQILQPDSGTTLSSPPV

SEQ ID NO: 76463 - protein, 267 aa, synthetic construct
  REGION 1..267: note = P09237 MMP7
MRLTVLCAVCLLPGSLALPLPQEAGGMSELQWEQAQDYLKRFYLYDSETKNANSLEAKLKEMQKFFGLPITGMLNSRVIEIMQKPRCGVPDVAEYSLFPNSPKWTSKVVTYRIVSYTRDLPHITVDRLVSKALNMWGKEIPLHFRKVVWGTADIMIGFARGAHGDSYPFDGPGNTLAHAFAPGTGLGGDAHFDEDERWTDGSSLGINFLYAATHELGHSLGMGHSSDPNAVMYPTYGNGDPQNFKLSQDDIKGIQKLYGKRSNSRKK

SEQ ID NO: 76464 - protein, 1820 aa, synthetic construct
  REGION 1..1820: note = Q96Q89 KI20B
MESNFNQEGVPRPSYVFSADPIARPSEINFDGIKLDLSHEFSLVAPNTEANSFESKDYLQVCLRIRPFTQSEKELESEGCVHILDSQTVVLKEPQCILGRLSEKSSGQMAQKFSFSKVFGPATTQKEFFQGCIMQPVKDLLKGQSRLIFTYGLTNSGKTYTFQGTEENIGILPRTLNVLFDSLQERLYTKMNLKPHRSREYLRLSSEQEKEEIASKSALLRQIKEVTVHNDSDDTLYGSLTNSLNISEFEESIKDYEQANLNMANSIKFSVWVSFFEIYNEYIYDLFVPVSSKFQKRKMLRLSQDVKGYSFIKDLQWIQVSDSKEAYRLLKLGIKHQSVAFTKLNNASSRSHSIFTVKILQIEDSEMSRVIRVSELSLCDLAGSERTMKTQNEGERLRETGNINTSLLTLGKCINVLKNSEKSKFQQHVPFRESKLTHYFQSFFNGKGKICMIVNISQCYLAYDETLNVLKFSAIAQKVCVPDTLNSSQEKLFGPVKSSQDVSLDSNSNSKILNVKRATISWENSLEDLMEDEDLVEELENAEETQNVETKLLDEDLDKTLEENKAFISHEEKRKLLDLIEDLKKKLINEKKEKLTLEFKIREEVTQEFTQYWAQREADFKETLLQEREILEENAERRLAIFKDLVGKCDTREEAAKDICATKVETEETHNYVGFEDIIDSLQDNVADIKKQAEIAHLYIASLPDPQEATACLELKFNQIKAELAKTKGELIKTKEELKKRENESDSLIQELETSNKKIITQNQRIKELINIIDQKEDTINEFQNLKSHMENTFKCNDKADTSSLIINNKLICNETVEVPKDSKSKICSERKRVNENELQQDEPPAKKGSIHVSSAITEDQKKSEEVRPNIAEIEDIRVLQENNEGLRAFLLTIENELKNEKEEKAELNKQIVHFQQELSLSEKKNLTLSKEVQQIQSNYDIAIAELHVQKSKNQEQEEKIMKLSNEIETATRSITNNVSQIKLMHTKIDELRTLDSVSQISNIDLLNLRDLSNGSEEDNLPNTQLDLLGNDYLVSKQVKEYRIQEPNRENSFHSSIEAIWEECKEIVKASSKKSHQIEELEQQIEKLQAEVKGYKDENNRLKEKEHKNQDDLLKEKETLIQQLKEELQEKNVTLDVQIQHVVEGKRALSELTQGVTCYKAKIKELETILETQKVECSHSAKLEQDILEKESIILKLERNLKEFQEHLQDSVKNTKDLNVKELKLKEEITQLTNNLQDMKHLLQLKEEEEETNRQETEKLKEELSASSARTQNLKADLQRKEEDYADLKEKLTDAKKQIKQVQKEVSVMRDEDKLLRIKINELEKKKNQCSQELDMKQRTIQQLKEQLNNQKVEEAIQQYERACKDLNVKEKIIEDMRMTLEEQEQTQVEQDQVLEAKLEEVERLATELEKWKEKCNDLETKNNQRSNKEHENNTDVLGKLTNLQDELQESEQKYNADRKKWLEEKMMLITQAKEAENIRNKEMKKYAEDRERFFKQQNEMEILTAQLTEKDSDLQKWREERDQLVAALEIQLKALISSNVQKDNEIEQLKRIISETSKIETQIMDIKPKRISSADPDKLQTEPLSTSFEISRNKIEDGSVVLDSCEVSTENDQSTRFPKPELEIQFTPLQPNKMAVKHPGCTTPVTVKIPKARKRKSNEMEEDLVKCENKKNATPRTNLKFPISDDRNSSVKKEQKVAIRPSSKKTYSLRSQASIIGVNLATKKKEGTLQKFGDFLQHSPSILQSKAKKIIETMSSSKLSNVEASKENVSQPKRAKRKLYTSEISSPIDISGQVILMDQKMKESDHQIIKRRLRTKTAK

SEQ ID NO: 76465 - protein, 317 aa, synthetic construct
  REGION 1..317: note = P43358 MAGA4
MSSEQKSQHCKPEEGVEAQEEALGLVGAQAPTTEEQEAAVSSSSPLVPGTLEEVPAAESAGPPQSPQGASALPTTISFTCWRQPNEGSSSQEEEGPSTSPDAESLFREALSNKVDELAHFLLRKYRAKELVTKAEMLERVIKNYKRCFPVIFGKASESLKMIFGIDVKEVDPASNTYTLVTCLGLSYDGLLGNNQIFPKTGLLIIVLGTIAMEGDSASEEEIWEELGVMGVYDGREHTVYGEPRKLLTQDWVQENYLEYRQVPGSNPARYEFLWGPRALAETSYVKVLEHVVRVNARVRIAYPSLREAALLEEEEGV

SEQ ID NO: 76466 - protein, 309 aa, synthetic construct
  REGION 1..309: note = P43355 MAGA1
MSLEQRSLHCKPEEALEAQQEALGLVCVQAATSSSSPLVLGTLEEVPTAGSTDPPQSPQGASAFPTTINFTRQRQPSEGSSSREEEGPSTSCILESLFRAVITKKVADLVGFLLLKYRAREPVTKAEMLESVIKNYKHCFPEIFGKASESLQLVFGIDVKEADPTGHSYVLVTCLGLSYDGLLGDNQIMPKTGFLIIVLVMIAMEGGHAPEEEIWEELSVMEVYDGREHSAYGEPRKLLTQDLVQEKYLEYRQVPDSDPARYEFLWGPRALAETSYVKVLEYVIKVSARVRFFFPSLREAALREEEEGV

SEQ ID NO: 76467 - protein, 1142 aa, synthetic construct
  REGION 1..1142: note = O60732 MAGC1
MGDKDMPTAGMPSLLQSSSESPQSCPEGEDSQSPLQIPQSSPESDDTLYPLQSPQSRSEGEDSSDPLQRPPEGKDSQSPLQIPQSSPEGDDTQSPLQNSQSSPEGKDSLSPLEISQSPPEGEDVQSPLQNPASSFFSSALLSIFQSSPESTQSPFEGFPQSVLQIPVSAASSSTLVSIFQSSPESTQSPFEGFPQSPLQIPVSRSFSSTLLSIFQSSPERTQSTFEGFAQSPLQIPVSPSSSSTLLSLFQSFSERTQSTFEGFAQSSLQIPVSPSFSSTLVSLFQSSPERTQSTFEGFPQSPLQIPVSSSSSSTLLSLFQSSPERTHSTFEGFPQSLLQIPMTSSFSSTLLSIFQSSPESAQSTFEGFPQSPLQIPGSPSFSSTLLSLFQSSPERTHSTFEGFPQSPLQIPMTSSFSSTLLSILQSSPESAQSAFEGFPQSPLQIPVSSSFSYTLLSLFQSSPERTHSTFEGFPQSPLQIPVSSSSSSSTLLSLFQSSPECTQSTFEGFPQSPLQIPQSPPEGENTHSPLQIVPSLPEWEDSLSPHYFPQSPPQGEDSLSPHYFPQSPPQGEDSLSPHYFPQSPQGEDSLSPHYFPQSPPQGEDSMSPLYFPQSPLQGEEFQSSLQSPVSICSSSTPSSLPQSFPESSQSPPEGPVQSPLHSPQSPPEGMHSQSPLQSPESAPEGEDSLSPLQIPQSPLEGEDSLSSLHFPQSPPEWEDSLSPLHFPQFPPQGEDFQSSLQSPVSICSSSTSLSLPQSFPESPQSPPEGPAQSPLQRPVSSFFSYTLASLLQSSHESPQSPPEGPAQSPLQSPVSSFPSSTSSSLSQSSPVSSFPSSTSSSLSKSSPESPLQSPVISFSSSTSLSPFSEESSSPVDEYTSSSDTLLESDSLTDSESLIESEPLFTYTLDEKVDELARFLLLKYQVKQPITKAEMLTNVISRYTGYFPVIFRKAREFIEILFGISLREVDPDDSYVFVNTLDLTSEGCLSDEQGMSQNRLLILILSIIFIKGTYASEEVIWDVLSGIGVRAGREHFAFGEPRELLTKVWVQEHYLEYREVPNSSPPRYEFLWGPRAHSEVIKRKVVEFLAMLKNTVPITFPSSYKDALKDVEERAQAIIDTTDDSTATESASSSVMSPSFSSE

SEQ ID NO: 76468 - protein, 509 aa, synthetic construct
  REGION 1..509: note = P78395 PRAME
MERRRLWGSIQSRYISMSVWTSPRRLVELAGQSLLKDEALAIAALELLPRELFPPLFMAAFDGRHSQTLKAMVQAWPFTCLPLGVLMKGQHLHLETFKAVLDGLDVLLAQEVRPRRWKLQVLDLRKNSHQDFWTVWSGNRASLYSFPEPEAAQPMTKKRKVDGLSTEAEQPFIPVEVLVDLFLKEGACDELFSYLIEKVKRKKNVLRLCCKKLKIFAMPMQDIKMILKMVQLDSIEDLEVTCTWKLPTLAKFSPYLGQMINLRRLLLSHIHASSYISPEKEEQYIAQFTSQFLSLQCLQALYVDSLFFLRGRLDQLLRHVMNPLETLSITNCRLSEGDVMHLSQSPSVSQLSVLSLSGVMLTDVSPEPLQALLERASATLQDLVFDECGITDDQLLALLPSLSHCSQLTTLSFYGNSISISALQSLLQHLIGLSNLTHVLYPVPLESYEDIHGTLHLERLAYLHARLRELLCELGRPSMVWLSANPCPHCGDRTFYDPEPILCPCFMPN

SEQ ID NO: 76469 - protein, 142 aa, synthetic construct
  REGION 1..142: note = O15392 BIRC5
MGAPTLPPAWQPFLKDHRISTFKNWPFLEGCACTPERMAEAGFIHCPTENEPDLAQCFFCFKELEGWEPDDDPIEEHKKHSSGCAFLSVKKQFEELTLGEFLKLDRERAKNKIAKETNNKKKEFEETAKKVRRAIEQLAAMD

SEQ ID NO: 76470 - protein, 315 aa, synthetic construct
  REGION 1..315: note = P43362 MAGA9
MSLEQRSPHCKPDEDLEAQGEDLGLMGAQEPTGEEEETTSSSDSKEEEVSAAGSSSPPQSPQGGASSSISVYYTLWSQFDEGSSSQEEEEPSSSVDPAQLEFMFQEALKLKVAELVHFLLHKYRVKEPVTKAEMLESVIKNYKRYFPVIFGKASEFMQVIFGTDVKEVDPAGHSYILVTALGLSCDSMLGDGHSMPKAALLIIVLGVILTKDNCAPEEVIWEALSVMGVYVGKEHMFYGEPRKLLTQDWVQENYLEYRQVPGSDPAHYEFLWGSKAHAETSYEKVINYLVMLNAREPICYPSLYEEVLGEEQEGV

SEQ ID NO: 76471 - protein, 373 aa, synthetic construct
  REGION 1..373: note = Q9UBF1 MAGC2
MPPVPGVPFRNVDNDSPTSVELEDWVDAQHPTDEEEEEASSASSTLYLVFSPSSFSTSSSLILGGPEEEEVPSGVIPNLTESIPSSPPQGPPQGPSQSPLSSCCSSFSWSSFSEESSSQKGEDTGTCQGLPDSESSFTYTLDEKVAELVEFLLLKYEAEEPVTEAEMLMIVIKYKDYFPVILKRAREFMELLFGLALIEVGPDHFCVFANTVGLTDEGSDDEGMPENSLLIIILSVIFIKGNCASEEVIWEVLNAVGVYAGREHFVYGEPRELLTKVWVQGHYLEYREVPHSSPPYYEFLWGPRAHSESIKKKVLEFLAKLNNTVPSSFPSWYKDALKDVEERVQATIDTADDATVMASESLSVMSSNVSFSE

SEQ ID NO: 76472 - protein, 821 aa, synthetic construct
  REGION 1..821: note = P21802 FGFR2
MVSWGRFICLVVVTMATLSLARPSFSLVEDTTLEPEEPPTKYQISQPEVYVAAPGESLEVRCLLKDAAVISWTKDGVHLGPNNRTVLIGEYLQIKGATPRDSGLYACTASRTVDSETWYFMVNVTDAISSGDDEDDTDGAEDFVSENSNNKRAPYWTNTEKMEKRLHAVPAANTVKFRCPAGGNPMPTMRWLKNGKEFKQEHRIGGYKVRNQHWSLIMESVVPSDKGNYTCVVENEYGSINHTYHLDVVERSPHRPILQAGLPANASTVVGGDVEFVCKVYSDAQPHIQWIKHVEKNGSKYGPDGLPYLKVLKAAGVNTTDKEIEVLYIRNVTFEDAGEYTCLAGNSIGISFHSAWLTVLPAPGREKEITASPDYLEIAIYCIGVFLIACMVVTVILCRMKNTTKKPDFSSQPAVHKLTKRIPLRRQVTVSAESSSSMNSNTPLVRITTRLSSTADTPMLAGVSEYELPEDPKWEFPRDKLTLGKPLGEGCFGQVVMAEAVGIDKDKPKEAVTVAVKMLKDDATEKDLSDLVSEMEMMKMIGKHKNIINLLGACTQDGPLYVIVEYASKGNLREYLRARRPPGMEYSYDINRVPEEQMTFKDLVSCTYQLARGMEYLASQKCIHRDLAARNVLVTENNVMKIADFGLARDINNIDYYKKTTNGRLPVKWMAPEALFDRVYTHQSDVWSFGVLMWEIFTLGGSPYPGIPVEELFKLLKEGHRMDKPANCTNELYMMMRDCWHAVPSQRPTFKQLVEDLDRILTLTTNEEYLDLSQPLEQYSPSYPDTRSSCSSGDDSVFSPDPMPYEPCLPQYPHINGSVKT

SEQ ID NO: 76473 - protein, 261 aa, synthetic construct
  REGION 1..261: note = P07288 KLK3
MWVPVVFLTLSVTWIGAAPLILSRIVGGWECEKHSQPWQVLVASRGRAVCGGVLVHPQWVLTAAHCIRNKSVILLGRHSLFHPEDTGQVFQVSHSFPHPLYDMSLLKNRFLRPGDDSSHDLMLLRLSEPAELTDAVKVMDLPTQEPALGTTCYASGWGSIEPEEFLTPKKLQCVDLHVISNDVCAQVHPQKVTKFMLCAGRWTGGKSTCSGDSGGPLVCNGVLQGITSWGSEPCALPERPSLYTKVVHYRKWIKDTIVANP

SEQ ID NO: 76474 - protein, 750 aa, synthetic construct
  REGION 1..750: note = Q04609 FOLH1
MWNLLHETDSAVATARRPRWLCAGALVLAGGFFLLGFLFGWFIKSSNEATNITPKHNMKAFLDELKAENIKKFLYNFTQIPHLAGTEQNFQLAKQIQSQWKEFGLDSVELAHYDVLLSYPNKTHPNYISIINEDGNEIFNTSLFEPPPPGYENVSDIVPPFSAFSPQGMPEGDLVYVNYARTEDFFKLERDMKINCSGKIVIARYGKVFRGNKVKNAQLAGAKGVILYSDPADYFAPGVKSYPDGWNLPGGGVQRGNILNLNGAGDPLTPGYPANEYAYRRGIAEAVGLPSIPVHPIGYYDAQKLLEKMGGSAPPDSSWRGSLKVPYNVGPGFTGNFSTQKVKMHIHSTNEVTRIYNVIGTLRGAVEPDRYVILGGHRDSWVFGGIDPQSGAAVVHEIVRSFGTLKKEGWRPRRTILFASWDAEEFGLLGSTEWAEENSRLLQERGVAYINADSSIEGNYTLRVDCTPLMYSLVHNLTKELKSPDEGFEGKSLYESWTKKSPSPEFSGMPRISKLGSGNDFEVFFQRLGIASGRARYTKNWETNKFSGYPLYHSVYETYELVEKFYDPMFKYHLTVAQVRGGMVFELANSIVLPFDCRDYAVVLRKYADKIYSISMKHPQEMKTYSVSFDSLFSAVKNFTEIASKFSERLQDFDKSNPIVLRMMNDQLMFLERAFIDPLGLPDRPFYRHVIYAPSSHNKYAGESFPGIYDALFDIESKVDPSKAWGEVKRQIYVAAFTVQAAAETLSEVA

SEQ ID NO: 76475 - RNA, 27 nt, synthetic construct
  misc_feature 1..27: note = Linker 1
  source 1..27: mol_type = other RNA
agcggcgggtccggcgggagcggcggg

SEQ ID NO: 76476-76477 - skipped (2 entries)

SEQ ID NO: 76478 - RNA, 30 nt, synthetic construct
  misc_feature 1..30: note = Linker 4
  source 1..30: mol_type = other RNA
ggcgggggcgggagcggcgggggcggcacc

SEQ ID NO: 76479 - RNA, 27 nt, synthetic construct
  misc_feature 1..27: note = Linker 5
  source 1..27: mol_type = other RNA
ggcgggggcgggagcggcgggggcggc

SEQ ID NO: 76480 - RNA, 12 nt, synthetic construct
  misc_feature 1..12: note = Linker 6
  source 1..12: mol_type = other RNA
ggccccagcctg

SEQ ID NO: 76481 - RNA, 24 nt, synthetic construct
  misc_feature 1..24: note = Linker 7
  source 1..24: mol_type = other RNA
ggcagcaccgtggccgccccctcc

SEQ ID NO: 76482 - RNA, 24 nt, synthetic construct
  misc_feature 1..24: note = Linker 8
  source 1..24: mol_type = other RNA
accgtggccgcccccagcggctcc

SEQ ID NO: 76483 - RNA, 30 nt, synthetic construct
  misc_feature 1..30: note = Linker 9
  source 1..30: mol_type = other RNA
ggcagcaccgtggccgccccctccgggagc

SEQ ID NO: 76484 - RNA, 15 nt, synthetic construct
  misc_feature 1..15: note = Linker 10
  source 1..15: mol_type = other RNA
ggcgggggcgggagc

SEQ ID NO: 76485 - RNA, 18 nt, synthetic construct
  misc_feature 1..18: note = Linker 11
  source 1..18: mol_type = other RNA
accgtggccgcccccagc

SEQ ID NO: 76486-76487 - skipped (2 entries)

SEQ ID NO: 76488 - RNA, 18 nt, synthetic construct
  misc_feature 1..18: note = Linker 14
  source 1..18: mol_type = other RNA
cccgccgtgccgcccccc

SEQ ID NO: 76489 - RNA, 18 nt, synthetic construct
  misc_feature 1..18: note = Linker 15
  source 1..18: mol_type = other RNA
accgtgagcgacgtcccc

SEQ ID NO: 76490 - RNA, 18 nt, synthetic construct
  misc_feature 1..18: note = Linker 16
  source 1..18: mol_type = other RNA
accggcctggacagcccc

SEQ ID NO: 76491 - RNA, 33 nt, synthetic construct
  misc_feature 1..33: note = Linker 17
  source 1..33: mol_type = other RNA
cactacggcgccgaggccctggagcgcgcgggg

SEQ ID NO: 76492 - skipped

SEQ ID NO: 76493 - RNA, 12 nt, synthetic construct
  misc_feature 1..12: note = Linker 19
  source 1..12: mol_type = other RNA
gccgccgcggcc

SEQ ID NO: 76494 - RNA, 45 nt, synthetic construct
  misc_feature 1..45: note = CV Linker
  source 1..45: mol_type = other RNA
ggcgggggcgggagcggcgggggcggctccgggggcgggggcagc

SEQ ID NO: 76495 - RNA, 27 nt, synthetic construct
  misc_feature 1..27: note = Prostate-specific antigen precursor (17-25)
  source 1..27: mol_type = other RNA
gccgcccccctgatcctcagccgcatc

SEQ ID NO: 76496 - RNA, 27 nt, synthetic construct
  misc_feature 1..27: note = Prostate-specific antigen precursor (65-73)
  source 1..27: mol_type = other RNA
cactgcatccgcaacaagagcgtgatc

SEQ ID NO: 76497 - RNA, 30 nt, synthetic construct
  misc_feature 1..30: note = Prostate-specific antigen precursor (65-74)
  source 1..30: mol_type = other RNA
cactgcatccgcaacaagagcgtgatcctg

SEQ ID NO: 76498 - RNA, 27 nt, synthetic construct
  misc_feature 1..27: note = Prostate-specific antigen precursor (82-90)
  source 1..27: mol_type = other RNA
caccccgaggacaccggccaggtgttc

SEQ ID NO: 76499 - RNA, 27 nt, synthetic construct
  misc_feature 1..27: note = Prostate-specific antigen precursor (188-196)
  source 1..27: mol_type = other RNA
cacccccagaaggtgaccaagttcatg

SEQ ID NO: 76500 - RNA, 27 nt, synthetic construct
  misc_feature 1..27: note = Prostate-specific antigen precursor (243-251)
  source 1..27: mol_type = other RNA
tacaccaaggtggtccactaccgcaag

SEQ ID NO: 76501 - RNA, 30 nt, synthetic construct
  misc_feature 1..30: note = Prostate-specific antigen precursor (178-187)
  source 1..30: mol_type = other RNA
gtgatcagcaacgacgtctgcgcccaggtg

SEQ ID NO: 76502 - RNA, 45 nt, synthetic construct
  misc_feature 1..45: note = Prostate-specific antigen precursor (88-102)
  source 1..45: mol_type = other RNA
caggtgttccaggtcagccactccttcccccacccgctgtacgac

SEQ ID NO: 76503 - RNA, 27 nt, synthetic construct
  misc_feature 1..27: note = Kita-kyushu lung cancer antigen 1 (40-48)
  source 1..27: mol_type = other RNA
ctggtgcgccccagctccagcggcctc

SEQ ID NO: 76504 - RNA, 33 nt, synthetic construct
  misc_feature 1..33: note = Trophoblast glycoprotein (104-114)
  source 1..33: mol_type = other RNA
gccgtgctgcccgccggcgcgttcgcccgccgg

SEQ ID NO: 76505 - RNA, 27 nt, synthetic construct
  misc_feature 1..27: note = Trophoblast glycoprotein (33-41)
  source 1..27: mol_type = other RNA
agccccacctccagcgcctccagcttc

SEQ ID NO: 76506 - RNA, 27 nt, synthetic construct
  misc_feature 1..27: note = Cyclin-dependent kinase inhibitor 2A (68-76)
  source 1..27: mol_type = other RNA
gccgaggagctgggccaccgcgacgtg

SEQ ID NO: 76507 - RNA, 30 nt, synthetic construct
  misc_feature 1..30: note = Cyclin-dependent kinase inhibitor 2A, isoforms 1/2/3 (87-96)
  source 1..30: mol_type = other RNA
cgcgagggcttcctggacaccctcgtggtc

SEQ ID NO: 76508 - RNA, 33 nt, synthetic construct
  misc_feature 1..33: note = Cyclin-dependent kinase inhibitor 2A, isoforms 1/2/3 (87-97)
  source 1..33: mol_type = other RNA
cgcgagggcttcctggacaccctcgtggtcctg

SEQ ID NO: 76509 - RNA, 27 nt, synthetic construct
  misc_feature 1..27: note = multiple tumor suppressor 1/cyclin-dependent kinase 4 inhibitor p16, partial (7-15)
  source 1..27: mol_type = other RNA
gcccgcgtggccgagctgctcctgctg

SEQ ID NO: 76510 - RNA, 27 nt, synthetic construct
  misc_feature 1..27: note = multiple tumor suppressor 1/cyclin-dependent kinase 4 inhibitor p16, partial (52-60)
  source 1..27: mol_type = other RNA
gcccgcctggacgtgcgggacgcctgg

SEQ ID NO: 76511 - RNA, 27 nt, synthetic construct
  misc_feature 1..27: note = multiple tumor suppressor 1/cyclin-dependent kinase 4 inhibitor p16, partial (63-71)
  source 1..27: mol_type = other RNA
ctgcccgtggacctcgccgaggagctg

SEQ ID NO: 76512 - RNA, 39 nt, synthetic construct
  misc_feature 1..39: note = Cyclin-dependent kinase inhibitor 2A, isoforms 1/2/3 (111-123)
  source 1..39: mol_type = other RNA
ggccgcctgcccgtggacctcgccgaggagctggggcac

SEQ ID NO: 76513 - RNA, 27 nt, synthetic construct
  misc_feature 1..27: note = Cyclin-dependent kinase inhibitor 2A (58-66)
  source 1..27: mol_type = other RNA
cgcgtggccgagctgctcctgctgcac

SEQ ID NO: 76514 - RNA, 30 nt, synthetic construct
  misc_feature 1..30: note = GTPase NRas (55-64)
  source 1..30: mol_type = other RNA
atcctggacaccgccggccaggaggagtac

SEQ ID NO: 76515 - RNA, 2298 nt, synthetic construct
  misc_feature 1..2298: note = P15056 BRAF
  source 1..2298: mol_type = other RNA
atggccgccctgagcggcgggggcgggggcggggcggagcccggccaggccctcttcaacggcgacatggagccggaggccggggccggcgccggggcggccgcctccagcgccgcggaccccgccatccccgaggaggtgtggaacatcaagcagatgatcaagctgacccaggagcacatcgaggccctgctcgacaagttcggcggggagcacaaccccccgtccatctacctggaggcctacgaggagtacaccagcaagctggacgccctccagcagcgcgagcagcagctgctggagtccctcggcaacggcacggacttcagcgtctccagctccgcgagcatggacaccgtgacctccagctccagctccagcctgtccgtgctgcccagctccctcagcgtcttccagaaccccaccgacgtggcccggagcaaccccaagtccccgcagaagcccatcgtgcgcgtcttcctgcccaacaagcagcggacggtggtgcccgcccgctgcggggtcaccgtgcgggacagcctgaagaaggccctcatgatgcgcggcctgatcccggagtgctgcgccgtgtaccggatccaggacggggagaagaagcccatcggctgggacaccgacatctcctggctgaccggcgaggagctccacgtcgaggtgctggagaacgtgcccctgacgacccacaacttcgtccgcaagaccttcttcaccctcgcgttctgcgacttctgccggaagctgctgttccaggggttccgctgccagacgtgcggctacaagttccaccagcggtgcagcaccgaggtgcccctcatgtgcgtgaactacgaccagctggacctgctcttcgtctccaagttcttcgagcaccacccgatcccccaggaggaggccagcctggccgagaccgccctgacctccgggagctcccccagcgcccccgcgtccgacagcatcggcccgcagatcctcacgtcccccagcccctccaagagcatccccatcccgcagcccttccgccccgccgacgaggaccaccggaaccagttcgggcagcgcgaccggtccagctccgcccccaacgtgcacatcaacaccatcgagccggtgaacatcgacgacctgatccgcgaccagggcttccggggcgacgggggcagcaccaccgggctgagcgccacgccccccgcctccctcccgggcagcctgaccaacgtcaaggcgctgcagaagtcccccgggccccagcgcgagcggaagagctccagctccagcgaggaccgcaaccggatgaagaccctcggccgccgcgactccagcgacgactgggagatccccgacggccagatcaccgtggggcagcggatcggctccgggagcttcggcacggtgtacaaggggaagtggcacggcgacgtcgccgtgaagatgctgaacgtcaccgccccgaccccccagcagctgcaggccttcaagaacgaggtgggcgtgctccgcaagacccggcacgtcaacatcctgctgttcatggggtactccacgaagccccagctcgcgatcgtgacccagtggtgcgagggcagctccctgtaccaccacctgcacatcatcgagaccaagttcgagatgatcaagctcatcgacatcgcccgccagaccgcccaggggatggactacctgcacgccaagagcatcatccaccgggacctgaagtccaacaacatcttcctccacgaggacctgacggtgaagatcggcgacttcggcctggccaccgtcaagagccgctggagcgggtcccaccagttcgagcagctgagcggctccatcctctggatggcgcccgaggtgatccggatgcaggacaagaacccgtacagcttccagtccgacgtgtacgccttcgggatcgtcctgtacgagctgatgaccggccagctcccctacagcaacatcaacaaccgcgaccagatcatcttcatggtggggcggggctacctgtcccccgacctgagcaaggtgcgctccaactgccccaaggccatgaagcggctcatggccgagtgcctgaagaagaagcgcgacgagcggccgctgttcccccagatcctcgccagcatcgagctgctggcgcgctccctccccaagatccaccggagcgcctccgagcccagcctgaaccgcgccggcttccagaccgaggacttctccctgtacgcctgcgccagcccgaagacgcccatccaggcggggggctacggggccttccccgtccac

SEQ ID NO: 76516 - RNA, 3204 nt, synthetic construct
  misc_feature 1..3204: note = P42336 PK3CA
  source 1..3204: mol_type = other RNA
atgcccccgcgccccagctccggcgagctgtgggggatccacctcatgcccccccggatcctggtggagtgcctgctcccgaacggcatgatcgtcaccctggagtgcctgcgcgaggccaccctcatcacgatcaagcacgagctgttcaaggaggcccggaagtaccccctgcaccagctcctgcaggacgagagctcctacatcttcgtgagcgtgacccaggaggcggagcgcgaggagttcttcgacgagacccggcgcctgtgcgacctccggctgttccagcccttcctgaaggtcatcgagcccgtggggaaccgcgaggagaagatcctcaaccgggagatcggcttcgccatcgggatgccggtgtgcgagttcgacatggtcaaggaccccgaggtgcaggacttccgccggaacatcctgaacgtgtgcaaggaggccgtcgacctgcgcgacctcaactccccccacagccgggccatgtacgtgtaccccccgaacgtggagtccagccccgagctgcccaagcacatctacaacaagctggacaagggccagatcatcgtcgtgatctgggtgatcgtctcccccaacaacgacaagcagaagtacaccctcaagatcaaccacgactgcgtgccggagcaggtgatcgccgaggcgatccgcaagaagacgcggagcatgctgctgtccagcgagcagctcaagctgtgcgtcctggagtaccagggcaagtacatcctcaaggtgtgcgggtgcgacgagtacttcctggagaagtaccccctgtcccagtacaagtacatccgcagctgcatcatgctcggccggatgcccaacctgatgctgatggccaaggagtccctctacagccagctgcccatggactgcttcaccatgccgtcctacagccgccggatctccaccgccaccccctacatgaacggggagacgagcaccaagagcctgtgggtgatcaactccgccctccgcatcaagatcctgtgcgcgacctacgtcaacgtgaacatccgggacatcgacaagatctacgtgcgcaccggcatctaccacgggggcgagcccctgtgcgacaacgtcaacacgcagcgcgtgccctgcagcaacccgcggtggaacgagtggctcaactacgacatctacatccccgacctgccccgcgccgcccggctgtgcctctccatctgcagcgtcaagggccgcaagggggccaaggaggagcactgccccctggcctggggcaacatcaacctgttcgactacaccgacaccctcgtgtccgggaagatggcgctgaacctgtggccggtgccccacggcctcgaggacctgctgaaccccatcggcgtcaccgggagcaacccgaacaaggagacgccctgcctggagctcgagttcgactggttctccagcgtggtgaagttccccgacatgtccgtcatcgaggagcacgccaactggagcgtgtcccgggaggccggcttcagctactcccacgccgggctgagcaaccgcctggcccgggacaacgagctccgcgagaacgacaaggagcagctgaaggcgatctccacccgggaccccctgagcgagatcaccgagcaggagaaggacttcctctggtcccaccgccactactgcgtgaccatcccggagatcctgcccaagctgctcctgagcgtcaagtggaactcccgggacgaggtggcccagatgtactgcctggtgaaggactggccccccatcaagccggagcaggccatggagctcctggactgcaactaccccgaccccatggtccgcggcttcgccgtgcggtgcctggagaagtacctcacggacgacaagctgagccagtacctgatccagctcgtgcaggtcctgaagtacgagcagtacctggacaacctcctggtgcgcttcctgctcaagaaggccctgaccaaccagcggatcgggcacttcttcttctggcacctgaagagcgagatgcacaacaagaccgtgtcccagcgcttcggcctcctgctggagagctactgccgggcgtgcggcatgtacctcaagcacctgaaccgccaggtcgaggccatggagaagctgatcaacctcaccgacatcctgaagcaggagaagaaggacgagacgcagaaggtgcagatgaagttcctggtggagcagatgcggcgccccgacttcatggacgccctccaggggttcctgtccccgctgaaccccgcccaccagctcggcaacctgcgcctggaggagtgccggatcatgagctccgccaagcgccccctctggctgaactgggagaaccccgacatcatgagcgagctgctcttccagaacaacgagatcatcttcaagaacggggacgacctgcggcaggacatgctgaccctccagatcatccgcatcatggagaacatctggcagaaccagggcctggacctgcggatgctcccgtacgggtgcctgtccatcggcgactgcgtcggcctgatcgaggtggtgcgcaacagccacaccatcatgcagatccagtgcaaggggggcctcaagggggcgctgcagttcaactcccacaccctgcaccagtggctcaaggacaagaacaagggcgagatctacgacgccgccatcgacctgttcacgcggagctgcgccgggtactgcgtcgcgaccttcatcctgggcatcggcgaccgccacaactccaacatcatggtgaaggacgacgggcagctcttccacatcgacttcggccacttcctggaccacaagaagaagaagttcgggtacaagcgggagcgcgtgcccttcgtcctgacccaggacttcctcatcgtgatcagcaagggcgcccaggagtgcaccaagacgcgggagttcgagcgcttccaggagatgtgctacaaggcctacctggccatccggcagcacgccaacctgttcatcaacctcttctccatgatgctgggcagcgggatgcccgagctgcagtccttcgacgacatcgcgtacatccgcaagaccctcgccctggacaagaccgagcaggaggccctggagtacttcatgaagcagatgaacgacgcccaccacggcgggtggaccacgaagatggactggatcttccacaccatcaagcagcacgccctcaac

SEQ ID NO: 76517 - RNA, 567 nt, synthetic construct
  misc_feature 1..567: note = P01116 RASK
  source 1..567: mol_type = other RNA
atgaccgagtacaagctggtggtcgtgggcgccgggggcgtggggaagagcgccctcaccatccagctgatccagaaccacttcgtcgacgagtacgaccccacgatcgaggactcctaccgcaagcaggtggtgatcgacggcgagacctgcctgctcgacatcctggacaccgcggggcaggaggagtacagcgccatgcgggaccagtacatgcgcaccggcgagggcttcctgtgcgtcttcgccatcaacaacacgaagtccttcgaggacatccaccactaccgggagcagatcaagcgcgtgaaggacagcgaggacgtgccgatggtcctcgtggggaacaagtgcgacctgccctcccggaccgtggacaccaagcaggcccaggacctggcccgcagctacggcatccccttcatcgagacctccgcgaagacgcggcagcgcgtcgaggacgccttctacaccctcgtgcgggagatccgccagtaccggctgaagaagatcagcaaggaggagaagacccccgggtgcgtgaagatcaagaagtgcatcatcatg

SEQ ID NO: 76518 - RNA, 1242 nt, synthetic construct
  misc_feature 1..1242: note = O75874 IDHC
  source 1..1242: mol_type = other RNA
atgagcaagaagatctccggcgggagcgtggtcgagatgcagggcgacgagatgacccgcatcatctgggagctgatcaaggagaagctcatcttcccctacgtggagctggacctgcactcctacgacctcgggatcgagaaccgggacgccaccaacgaccaggtgacgaaggacgccgcggaggccatcaagaagcacaacgtcggcgtgaagtgcgccaccatcaccccggacgagaagcgcgtggaggagttcaagctgaagcagatgtggaagagccccaacgggaccatccggaacatcctgggcggcacggtcttccgcgaggccatcatctgcaagaacatcccccggctcgtgtccgggtgggtgaagcccatcatcatcggccgccacgcctacggggaccagtaccgggcgaccgacttcgtcgtgccgggccccgggaaggtggagatcacctacacccccagcgacggcacgcagaaggtcacctacctggtgcacaacttcgaggagggcgggggcgtggccatggggatgtacaaccaggacaagtccatcgaggacttcgcccacagctccttccagatggccctgagcaagggctggcccctctacctgtccaccaagaacaccatcctgaagaagtacgacggccgcttcaaggacatcttccaggagatctacgacaagcagtacaagagccagttcgaggcgcagaagatctggtacgagcaccggctcatcgacgacatggtcgcccaggccatgaagtccgaggggggcttcatctgggcctgcaagaactacgacggggacgtgcagagcgactccgtggcccagggctacgggagcctgggcatgatgacgtccgtcctggtgtgcccggacggcaagaccgtggaggcggaggccgcccacgggaccgtcacccgccactaccggatgtaccagaagggccaggagacgagcaccaaccccatcgcctccatcttcgcctggacccgcgggctcgcgcaccgggccaagctggacaacaacaaggagctggccttcttcgccaacgccctcgaggaggtgagcatcgagaccatcgaggcgggcttcatgacgaaggacctggccgcctgcatcaaggggctgcccaacgtgcagcgcagcgactacctcaacaccttcgagttcatggacaagctgggcgagaacctgaagatcaagctcgcccaggccaagctg

SEQ ID NO: 76519 - RNA, 1179 nt, synthetic construct
  misc_feature 1..1179: note = P04637 P53
  source 1..1179: mol_type = other RNA
atggaggagccccagagcgacccgtccgtggagccccccctgagccaggagaccttctccgacctctggaagctgctgcccgagaacaacgtcctcagcccgctgccctcccaggccatggacgacctgatgctcagccccgacgacatcgagcagtggttcaccgaggaccccggcccggacgaggccccccgcatgcccgaggcggcccccccggtggcccccgcccccgccgcgcccacgccggccgcccccgcccccgcgccctcctggccgctgagctccagcgtgccctcccagaagacctaccaggggagctacggcttccggctggggttcctccactccggcaccgccaagagcgtcacctgcacgtactcccccgccctgaacaagatgttctgccagctggccaagacctgccccgtgcagctctgggtggacagcaccccgccccccgggacccgcgtccgggccatggcgatctacaagcagtcccagcacatgacggaggtggtgcgccggtgcccccaccacgagcgctgcagcgactccgacggcctggccccgccccagcacctgatccgggtcgagggcaacctccgcgtggagtacctggacgaccggaacaccttccgccacagcgtggtcgtgccctacgagccgcccgaggtggggagcgactgcaccaccatccactacaactacatgtgcaactccagctgcatgggcgggatgaaccggcgccccatcctgacgatcatcaccctcgaggactccagcggcaacctgctggggcggaactccttcgaggtccgcgtgtgcgcctgccccggccgggaccgccggaccgaggaggagaacctccgcaagaagggcgagccgcaccacgagctgccccccgggagcaccaagcgggccctgcccaacaacacgtccagctccccgcagcccaagaagaagcccctcgacggcgagtacttcaccctgcagatccgcgggcgggagcgcttcgagatgttccgcgagctgaacgaggccctcgagctgaaggacgcgcaggccggcaaggagcccggcgggagccgggcccactccagccacctgaagtccaagaagggccagagcacctcccgccacaagaagctcatgttcaagaccgaggggccggacagcgac

SEQ ID NO: 76520 - RNA, 567 nt, synthetic construct
  misc_feature 1..567: note = P01111 RASN
  source 1..567: mol_type = other RNA
atgaccgagtacaagctggtggtcgtgggcgccgggggcgtggggaagagcgccctcaccatccagctgatccagaaccacttcgtcgacgagtacgaccccacgatcgaggactcctaccgcaagcaggtggtgatcgacggcgagacctgcctgctcgacatcctggacaccgcggggcaggaggagtacagcgccatgcgggaccagtacatgcgcaccggcgagggcttcctgtgcgtcttcgccatcaacaactccaagagcttcgccgacatcaacctctaccgggagcagatcaagcgcgtgaaggactccgacgacgtgccgatggtcctggtggggaacaagtgcgacctgcccacgcggaccgtggacaccaagcaggcccacgagctcgcgaagagctacggcatccccttcatcgagacctccgccaagacgcgccagggggtcgaggacgccttctacaccctggtgcgggagatccgccagtaccggatgaagaagctgaacagctccgacgacggcacccaggggtgcatgggcctcccctgcgtggtcatg

SEQ ID NO: 76521 - RNA, 1440 nt, synthetic construct
  misc_feature 1..1440: note = P31749 AKT1
  source 1..1440: mol_type = other RNA
atgagcgacgtggccatcgtcaaggagggctggctgcacaagcgcggggagtacatcaagacctggcggccccgctacttcctcctgaagaacgacggcaccttcatcgggtacaaggagcggccgcaggacgtggaccagcgcgaggcccccctgaacaacttctccgtggcgcagtgccagctcatgaagacggagcggccccgccccaacaccttcatcatccggtgcctgcagtggaccaccgtcatcgagcgcacgttccacgtggagaccccggaggagcgggaggagtggaccaccgccatccagacggtggccgacggcctgaagaagcaggaggaggaggagatggacttccgcagcgggtcccccagcgacaactccggcgccgaggagatggaggtcagcctcgccaagcccaagcaccgggtgaccatgaacgagttcgagtacctgaagctgctcggcaaggggaccttcggcaaggtgatcctggtcaaggagaaggcgaccgggcgctactacgccatgaagatcctgaagaaggaggtgatcgtggccaaggacgaggtcgcccacacgctcaccgagaaccgggtgctgcagaactcccgccaccccttcctgaccgcgctcaagtacagcttccagacccacgaccggctgtgcttcgtgatggagtacgccaacggcggggagctgttcttccacctctcccgcgagcgggtcttcagcgaggaccgcgcccggttctacggcgccgagatcgtgtccgccctggactacctgcacagcgagaagaacgtggtctaccgcgacctcaagctggagaacctgatgctcgacaaggacggccacatcaagatcacggacttcgggctgtgcaaggagggcatcaaggacggggcgaccatgaagaccttctgcggcaccccggagtacctggcccccgaggtgctcgaggacaacgactacggccgggccgtggactggtgggggctgggcgtcgtgatgtacgagatgatgtgcgggcgcctgcccttctacaaccaggaccacgagaagctcttcgagctgatcctgatggaggagatccgcttcccccggacgctcggcccggaggccaagtccctgctgagcgggctcctgaagaaggaccccaagcagcgcctgggcggcgggtccgaggacgccaaggagatcatgcagcaccggttcttcgcgggcatcgtgtggcagcacgtctacgagaagaagctcagcccccccttcaagccgcaggtgacctccgagaccgacacccgctacttcgacgaggagttcacggcccagatgatcaccatcaccccccccgaccaggacgacagcatggagtgcgtcgactccgagcggcgcccccacttcccgcagttcagctacagcgcctccgggaccgcc

SEQ ID NO: 76522 - RNA, 3912 nt, synthetic construct
  misc_feature 1..3912: note = O75533 SF3B1
  source 1..3912: mol_type = other RNA
atggccaagatcgccaagacccacgaggacatcgaggcgcagatccgcgagatccagggcaagaaggccgccctggacgaggcccagggggtgggcctcgacagcaccgggtactacgaccaggagatctacggcgggtccgacagccggttcgccggctacgtcacgtccatcgcggccaccgagctggaggacgacgacgacgactacagctccagcacctccctgctcggccagaagaagcccgggtaccacgccccggtggccctgctgaacgacatcccccagagcaccgagcagtacgaccccttcgcggagcaccgccccccgaagatcgccgaccgggaggacgagtacaagaagcaccgccggacgatgatcatctcccccgagcgcctcgaccccttcgccgacggcgggaagacccccgacccgaagatgaacgcccggacctacatggacgtgatgcgcgagcagcacctgaccaaggaggagcgggagatccgccagcagctggccgagaaggcgaaggccggcgagctcaaggtcgtgaacggggccgccgccagccagcccccctccaagcggaagcgccggtgggaccagacggcggaccagacccccggcgccaccccgaagaagctgagctcctgggaccaggccgagacccccggccacacgcccagcctgcgctgggacgagacccccgggcgggccaagggctccgagaccccgggggccacccccggcagcaagatctgggaccccacgccctcccacaccccggcgggcgccgccacccccgggcgcggcgacacccccgggcacgccacgcccggccacgggggcgccaccagctccgcgcggaagaaccgctgggacgagaccccgaagaccgagcgggacacgcccggccacgggagcggctgggccgagaccccccgcaccgaccgggggggcgacagcatcggggagacccccacgccgggcgcctccaagcgcaagagccgctgggacgagacccccgcctcccagatgggcgggagcacccccgtgctcaccccgggcaagacgcccatcgggacccccgcgatgaacatggccacccccaccccgggccacatcatgtccatgacgcccgagcagctgcaggcctggcggtgggagcgcgagatcgacgagcggaaccgccccctgagcgacgaggagctcgacgccatgttccccgaggggtacaaggtcctgccgccccccgccggctacgtgcccatccggaccccggcgcgcaagctgaccgccacccccacccccctcggcgggatgacgggcttccacatgcagaccgaggaccggaccatgaagtccgtgaacgaccagcccagcgggaacctgccgttcctgaagcccgacgacatccagtacttcgacaagctcctggtcgacgtggacgagtccaccctgagccccgaggagcagaaggagcgcaagatcatgaagctcctgctgaagatcaagaacggcacgcccccgatgcggaaggccgccctccgccagatcaccgacaaggcccgggagttcggcgcggggcccctgttcaaccagatcctgcccctcctgatgtcccccaccctggaggaccaggagcgccacctcctggtgaaggtcatcgaccggatcctgtacaagctcgacgacctggtgcgcccgtacgtgcacaagatcctggtcgtgatcgagcccctcctgatcgacgaggactactacgcccgggtggagggccgcgagatcatcagcaacctggccaaggccgccgggctcgcgaccatgatctccacgatgcggcccgacatcgacaacatggacgagtacgtccgcaacaccaccgcccgggccttcgccgtggtggcgagcgccctgggcatcccgtccctgctccccttcctgaaggccgtctgcaagagcaagaagtcctggcaggcccgccacaccgggatcaagatcgtgcagcagatcgccatcctgatgggctgcgcgatcctcccccacctgcgcagcctggtggagatcatcgagcacggcctggtcgacgagcagcagaaggtgcggacgatctccgccctcgccatcgccgccctggcggaggccgccaccccctacgggatcgagagcttcgacagcgtcctgaagccgctctggaagggcatccgccagcaccgggggaagggcctggccgccttcctgaaggcgatcgggtacctcatccccctgatggacgccgagtacgccaactactacacccgcgaggtgatgctgatcctcatccgggagttccagtcccccgacgaggagatgaagaagatcgtgctgaaggtcgtgaagcagtgctgcggcaccgacggcgtggaggccaactacatcaagacggagatcctgcccccgttcttcaagcacttctggcagcaccgcatggcgctcgaccggcgcaactaccggcagctggtcgacaccaccgtggagctggccaacaaggtgggggccgccgagatcatcagccgcatcgtcgacgacctcaaggacgaggccgagcagtaccggaagatggtgatggagaccatcgagaagatcatgggcaacctgggggcggccgacatcgaccacaagctggaggagcagctcatcgacggcatcctgtacgccttccaggagcagacgaccgaggactccgtgatgctgaacgggttcggcaccgtcgtgaacgccctcggcaagcgcgtgaagccctacctgccccagatctgcgggaccgtcctgtggcggctcaacaacaagagcgccaaggtgcgccagcaggcggccgacctgatctcccggacggccgtggtcatgaagacctgccaggaggagaagctgatgggccacctcggggtggtgctgtacgagtacctgggcgaggagtaccccgaggtcctcgggagcatcctgggcgccctgaaggccatcgtgaacgtgatcggcatgcacaagatgaccccgcccatcaaggacctcctgccccgcctgacccccatcctcaagaaccggcacgagaaggtccaggagaactgcatcgacctggtggggcgcatcgcggaccggggcgccgagtacgtgtccgcccgcgagtggatgcggatctgcttcgagctgctcgagctgctgaaggcccacaagaaggccatccgccgcgcgacggtcaacaccttcgggtacatcgccaaggccatcggcccgcacgacgtgctcgccaccctgctgaacaacctcaaggtgcaggagcggcagaaccgcgtctgcaccacggtggcgatcgccatcgtggccgagacctgcagccccttcaccgtcctgcccgccctgatgaacgagtaccgggtgcccgagctcaacgtgcagaacggcgtcctgaagtccctgagcttcctcttcgagtacatcggggagatgggcaaggactacatctacgccgtgaccccgctgctggaggacgcgctcatggaccgcgacctggtgcaccggcagacggcctccgccgtcgtgcagcacatgagcctgggggtgtacggcttcgggtgcgaggactccctcaaccacctgctgaactacgtctggcccaacgtgttcgagaccagcccccacgtgatccaggccgtcatgggcgccctcgagggcctgcgcgtggcgatcgggccctgccggatgctgcagtactgcctccagggcctgttccacccggcccgcaaggtgcgggacgtctactggaagatctacaactccatctacatcgggagccaggacgccctgatcgcccactacccccgcatctacaacgacgacaagaacacctacatccggtacgagctcgactacatcctg

SEQ ID NO: 76523 - RNA, 468 nt, synthetic construct
  misc_feature 1..468: note = P42771 CDN2A
  source 1..468: mol_type = other RNA
atggagcccgccgccggcagctccatggagccgagcgcggactggctggccaccgccgccgcccgcgggcgggtggaggaggtccgcgcgctcctggaggccggcgccctgcccaacgcccccaactcctacgggcggcgccccatccaggtgatgatgatgggcagcgcgcgggtggccgagctcctgctgctccacggggccgagccgaactgcgccgaccccgccaccctgacgcgccccgtccacgacgcggcccgggagggcttcctggacaccctcgtggtgctgcaccgcgccggcgcccggctggacgtccgcgacgcctgggggcggctccccgtggacctggcggaggagctgggccaccgcgacgtggcccggtacctccgcgccgccgccgggggcacccgggggtccaaccacgcgcgcatcgacgccgccgagggcccgagcgacatccccgac

SEQ ID NO: 76524 - RNA, 3630 nt, synthetic construct
  misc_feature 1..3630: note = P00533 EGFR
  source 1..3630: mol_type = other RNA
atgcgccccagcggcaccgccggggccgcgctgctcgccctgctggccgccctctgcccggcctcccgggcgctggaggagaagaaggtgtgccagggcaccagcaacaagctgacgcagctcgggaccttcgaggaccacttcctgtccctgcagcgcatgttcaacaactgcgaggtcgtgctcggcaacctggagatcacctacgtgcagcggaactacgacctgagcttcctcaagaccatccaggaggtcgccgggtacgtgctgatcgccctgaacacggtggagcgcatccccctcgagaacctgcagatcatccggggcaacatgtactacgagaactcctacgccctggcggtcctcagcaactacgacgccaacaagaccggcctgaaggagctgcccatgcgcaacctccaggagatcctgcacggggccgtgcggttctccaacaaccccgccctgtgcaacgtggagagcatccagtggcgcgacatcgtctccagcgacttcctctccaacatgagcatggacttccagaaccacctgggctcctgccagaagtgcgacccgagctgccccaacgggtcctgctggggcgccggggaggagaactgccagaagctgaccaagatcatctgcgcgcagcagtgcagcggccggtgccgcggcaagtcccccagcgactgctgccacaaccagtgcgccgccgggtgcaccggcccccgggagtccgactgcctcgtgtgccgcaagttccgggacgaggccacgtgcaaggacacctgcccgcccctgatgctgtacaaccccaccacctaccagatggacgtgaaccccgaggggaagtacagcttcggcgccacgtgcgtcaagaagtgcccgcgcaactacgtggtgaccgaccacggcagctgcgtccgggcgtgcggggccgactcctacgagatggaggaggacggcgtgcgcaagtgcaagaagtgcgaggggccctgccggaaggtgtgcaacggcatcgggatcggcgagttcaaggacagcctctccatcaacgccaccaacatcaagcacttcaagaactgcaccagcatctccggcgacctgcacatcctgcccgtcgccttccgcggggacagcttcacgcacacccccccgctcgacccccaggagctggacatcctgaagaccgtgaaggagatcaccggcttcctcctgatccaggcctggcccgagaaccggacggacctgcacgcgttcgagaacctcgagatcatccgcgggcggaccaagcagcacggccagttctccctggccgtggtcagcctgaacatcacctccctcgggctgcgcagcctgaaggagatctccgacggcgacgtgatcatcagcggcaacaagaacctctgctacgccaacaccatcaactggaagaagctgttcgggacgtccggccagaagaccaagatcatcagcaaccgcggggagaactcctgcaaggccaccggccaggtgtgccacgccctgtgcagccccgaggggtgctggggcccggagccccgggactgcgtctcctgccgcaacgtgagccggggccgcgagtgcgtcgacaagtgcaacctcctggagggggagccccgggagttcgtggagaactccgagtgcatccagtgccaccccgagtgcctgccgcaggcgatgaacatcacctgcacgggccgcgggcccgacaactgcatccagtgcgcccactacatcgacggcccccactgcgtgaagacctgccccgccggcgtcatgggggagaacaacaccctggtgtggaagtacgccgacgcgggccacgtgtgccacctctgccacccgaactgcacctacgggtgcacgggccccgggctggagggctgccccaccaacggcccgaagatccccagcatcgccaccgggatggtcggcgccctgctcctgctgctcgtggtggccctggggatcggcctgttcatgcggcgccggcacatcgtccgcaagcggaccctccgccggctgctgcaggagcgcgagctcgtggagcccctgacgcccagcggggaggccccgaaccaggcgctgctccggatcctgaaggagaccgagttcaagaagatcaaggtgctgggctccggcgccttcgggaccgtctacaagggcctctggatccccgagggggagaaggtgaagatccccgtggccatcaaggagctgcgcgaggccaccagccccaaggccaacaaggagatcctggacgaggcgtacgtcatggcctccgtggacaacccgcacgtgtgccggctcctgggcatctgcctgaccagcacggtccagctcatcacccagctgatgcccttcgggtgcctgctcgactacgtgcgcgagcacaaggacaacatcggctcccagtacctgctgaactggtgcgtgcagatcgccaagggcatgaactacctcgaggaccggcgcctggtccaccgcgacctggccgcccggaacgtgctcgtgaagaccccccagcacgtcaagatcaccgacttcgggctggcgaagctgctcggcgccgaggagaaggagtaccacgccgaggggggcaaggtgcccatcaagtggatggccctggagagcatcctgcaccgcatctacacgcaccagtccgacgtgtggagctacggggtcaccgtgtgggagctcatgaccttcggctccaagccgtacgacggcatccccgcgagcgagatctccagcatcctggagaagggggagcggctgccccagcccccgatctgcaccatcgacgtgtacatgatcatggtcaagtgctggatgatcgacgccgactcccgccccaagttccgggagctcatcatcgagttcagcaagatggcccgcgacccccagcggtacctggtgatccagggcgacgagcgcatgcacctgccctccccgacggacagcaacttctaccgggccctcatggacgaggaggacatggacgacgtggtcgacgccgacgagtacctgatcccccagcaggggttcttctccagccccagcacctcccgcacccccctgctcagctccctgagcgcgacctccaacaacagcacggtggcctgcatcgaccggaacggcctgcagtcctgcccgatcaaggaggacagcttcctccagcgctactccagcgaccccaccggcgccctgaccgaggactccatcgacgacaccttcctgcccgtgccggagtacatcaaccagagcgtccccaagcggcccgccgggtccgtgcagaaccccgtgtaccacaaccagccgctcaaccccgcccccagccgcgacccccactaccaggacccgcactccacggcggtcggcaaccccgagtacctgaacaccgtgcagcccacctgcgtgaacagcaccttcgactcccccgcccactgggcccagaaggggagccaccagatctccctggacaacccggactaccagcaggacttcttccccaaggaggccaagcccaacggcatcttcaaggggagcacggccgagaacgcggagtacctccgggtcgccccccagagctccgagttcatcggcgcc

SEQ ID NO: 76525 - RNA, 540 nt, synthetic construct
  misc_feature 1..540: note = P78358 CTG1B
  source 1..540: mol_type = other RNA
atgcaggccgagggccgcgggaccggcgggagcaccggcgacgccgacgggcccggcggcccggggatccccgacggccccgggggcaacgcggggggccccggcgaggccggggccacgggcgggcggggcccgcgcggcgccggggccgcgcgggcctccggccccgggggcggggccccccgcggcccccacggcggggccgcgagcggcctgaacgggtgctgccggtgcggcgcccgcgggccggagtcccggctcctggagttctacctggccatgcccttcgccacccccatggaggccgagctcgcgcgccggagcctggcccaggacgcccccccgctgcccgtgcccggcgtcctcctgaaggagttcaccgtgtccggcaacatcctgaccatccgcctcacggccgccgaccaccggcagctgcagctgagcatctccagctgcctccagcagctgtccctgctcatgtggatcacccagtgcttcctgcccgtgttcctggcgcagccgcccagcgggcagcgccgg

SEQ ID NO: 76526 - RNA, 3765 nt, synthetic construct
  misc_feature 1..3765: note = P15941 MUC1
  source 1..3765: mol_type = other RNA
atgacccccggcacccagagcccgttcttcctgctcctgctgctcacggtgctgaccgtcgtgaccgggtccggccacgccagctccacccccgggggcgagaaggagacgagcgccacccagcgctccagcgtgccctccagcaccgagaagaacgcggtctccatgaccagctccgtgctgagctcccacagccccgggtccggcagctccacgacccagggccaggacgtgaccctcgccccggccaccgagcccgccagcgggtccgccgcgacgtggggccaggacgtcaccagcgtgcccgtgacccggcccgccctggggagcaccacgccgcccgcccacgacgtcacctccgcccccgacaacaagcccgcgccgggcagcaccgccccccccgcccacggggtgacctccgcccccgacacgcgcccggcccccggcagcaccgcgccccccgcccacggcgtgacctccgccccggacacccggcccgcccccgggagcacggcccccccggcgcacggcgtcacctccgcccccgacacccgccccgcccccgggagcaccgccccgcccgcccacggcgtgacgtccgcgcccgacacccggccggcccccggcagcaccgccccccccgcccacggggtgacctccgccccggacacgcgccccgcgcccggcagcaccgcccccccggcccacggggtcacctccgcccccgacacccggcccgcgcccggcagcacggccccgcccgcccacggggtgacctccgcccccgacacccgccccgccccgggcagcaccgcgccccccgcccacggcgtgacctccgcccccgacacgcggccggcccccgggagcaccgccccccccgcgcacggcgtcacctccgccccggacacccgccccgcccccgggagcacggccccgcccgcccacggcgtgaccagcgcgcccgacacccggcccgccccggggtccaccgccccccccgcccacggcgtgacgagcgcgcccgacacccgcccggcccccggctccaccgccccccccgcccacggggtcaccagcgccccggacacgcggcccgcgcccggctccaccgcccccccggcccacggggtgaccagcgcccccgacacccgccccgcccccggctccacggcgccgcccgcccacggggtgaccagcgcccccgacacccggcccgccccgggctccaccgccccccccgcgcacggcgtcacgagcgcccccgacacccgcccggcccccgggtccaccgcccccccggcgcacggcgtgaccagcgcccccgacacgcggcccgcccccgggtccaccgccccgcccgcccacggcgtcaccagcgcgcccgacacccgccccgccccgggctccacggccccccccgcccacggggtgaccagcgcccccgacacccggccggcgcccggctccaccgccccccccgcccacggggtgacgagcgccccggacacccgccccgcccccggcagcaccgcgcccccggcccacggggtcacctccgcccccgacacgcggcccgcccccggcagcaccgccccgcccgcgcacggcgtgacctccgcccccgacacccgccccgccccggggagcaccgccccccccgcgcacggcgtgacgtccgccccggacacccgccccgcccccgggagcaccgcccccccggcccacggcgtcacctccgcgcccgacacgcggcccgcccccgggagcaccgccccgcccgcccacggcgtgacctccgcccccgacacccgccccgcgccgggcagcacggccccccccgcccacggggtgacctccgcccccgacacccggccggcccccggcagcaccgcgccccccgcccacggggtcacgtccgccccggacacccgccccgcccccggcagcaccgcgcccccggcccacggggtgacctccgcccccgacacgcggcccgccccgggcagcaccgccccccccgcgcacggcgtgacctccgcccccgacacccgcccggcccccgggagcacggccccccccgcccacggcgtcacctccgcgccggacacccggcccgcccccgggagcaccgcccccccggcccacggcgtgacgagcgcccccgacacccgccccgcgcccgggtccaccgccccgcccgcccacggcgtgaccagcgcccccgacacgcggcccgcgccgggctccaccgccccccccgcccacggggtcaccagcgcccccgacacccgcccggcccccggctccacggcgccccccgcccacggggtgaccagcgccccggacacccggcccgcccccggctccaccgccccgcccgcgcacggcgtgacgagcgcccccgacacccgccccgccccggggtccaccgccccccccgcccacggcgtcaccagcgcgcccgacacccggccggcccccgggtccacggccccccccgcccacggcgtgaccagcgccccggacacccgccccgcgcccgggtccaccgcccccccggcccacggcgtgacgagcgcccccgacacccggcccgcgcccggctccaccgccccgcccgcccacggggtcaccagcgcccccgacacgcgccccgccccgggctccaccgcgccccccgcccacggggtgaccagcgcccccgacacccggccggcccccggctccacggcccccccggcgcacggggtgaccagcgcccccgacacccgccccgcccccggcagcaccgccccgcccgcccacggcgtcacgtccgcgcccgacaaccggcccgccctggggagcaccgccccgcccgtgcacaacgtgacctccgccagcggctccgcgagcgggtccgccagcaccctcgtccacaacggcacgtccgcccgcgccaccaccacccccgccagcaagtccacgcccttcagcatcccgtcccaccacagcgacacccccaccaccctggcgtcccacagcacgaagaccgacgcctccagcacccaccactccagcgtgccccccctgaccagctccaaccacagcacgtccccgcagctcagcaccggggtgtccttcttcttcctgagcttccacatctccaacctgcagttcaacagctccctcgaggaccccagcaccgactactaccaggagctgcagcgcgacatctccgagatgttcctgcagatctacaagcagggcggcttcctcgggctgagcaacatcaagttccggcccggctccgtcgtggtgcagctgaccctcgccttccgcgaggggacgatcaacgtccacgacgtggagacccagttcaaccagtacaagaccgaggccgccagccggtacaacctgaccatctccgacgtgagcgtctccgacgtgcccttcccgttcagcgcgcagtccggcgccggcgtgcccgggtggggcatcgccctgctcgtcctggtgtgcgtgctggtcgccctcgccatcgtgtacctgatcgcgctggccgtgtgccagtgccgccggaagaactacgggcagctcgacatcttccccgcccgcgacacgtaccaccccatgagcgagtacccgacctaccacacccacggccggtacgtcccccccagctccaccgaccgcagcccctacgagaaggtgtccgccgggaacggcggcagctccctgagctacaccaacccggcggtggccgccacgtccgccaacctg

SEQ ID NO: 76527 - RNA, 1260 nt, synthetic construct
  misc_feature 1..1260: note = Q13641 TPBG
  source 1..1260: mol_type = other RNA
atgcccggcgggtgcagccgcggcccggccgccggggacggccggctgcgcctcgcgcggctggccctggtgctcctggggtgggtctccagctccagccccacctccagcgcctccagcttctccagctccgcccccttcctggccagcgcggtgtccgcccagcccccgctccccgaccagtgccccgccctgtgcgagtgcagcgaggccgcgcgcaccgtgaagtgcgtcaaccggaacctgacggaggtgcccaccgacctcccggcctacgtgcgcaacctgttcctgaccggcaaccagctcgccgtcctgcccgccggcgccttcgcgcggcgcccccccctggccgagctcgccgccctgaacctgtccgggagccggctcgacgaggtgcgcgccggcgcgttcgagcacctgccgtccctgcggcagctcgacctgagccacaaccccctggccgacctctcccccttcgccttcagcgggagcaacgcctccgtgagcgccccctccccgctggtcgagctgatcctcaaccacatcgtgccccccgaggacgagcgccagaaccggagcttcgagggcatggtggtcgcggccctgctggccgggcgcgccctccagggcctgcggcgcctggagctcgcctccaaccacttcctgtacctgccccgggacgtgctcgcgcagctgccgagcctgcgccacctcgacctgtccaacaacagcctggtgtccctcacctacgtcagcttccggaacctgacgcacctggagtccctccacctggaggacaacgccctgaaggtgctccacaacggcaccctggccgagctgcaggggctgccccacatccgcgtgttcctcgacaacaacccctgggtctgcgactgccacatggccgacatggtgacctggctgaaggagaccgaggtggtccagggcaaggaccggctgacgtgcgcgtaccccgagaagatgcgcaaccgcgtgctcctggagctgaacagcgccgacctcgactgcgacccgatcctgcccccctccctgcagaccagctacgtgttcctcgggatcgtcctggccctgatcggcgccatcttcctcctggtgctgtacctcaaccggaagggcatcaagaagtggatgcacaacatccgcgacgcctgccgggaccacatggaggggtaccactaccgctacgagatcaacgcggacccccggctgaccaacctgtccagcaactccgacgtc

SEQ ID NO: 76528 - RNA, 3765 nt, synthetic construct
  misc_feature 1..3765: note = P04626 ERBB2
  source 1..3765: mol_type = other RNA
atggagctggccgccctctgccgctggggcctgctgctcgcgctgctgcccccgggggccgccagcacccaggtgtgcaccggcacggacatgaagctccggctgcccgcctcccccgagacccacctggacatgctccgccacctgtaccaggggtgccaggtcgtgcagggcaacctggagctcacctacctgcccaccaacgccagcctgtccttcctccaggacatccaggaggtgcaggggtacgtcctgatcgcgcacaaccaggtgcggcaggtgccgctgcagcgcctccggatcgtccgcggcacgcagctgttcgaggacaactacgccctggccgtgctcgacaacggcgaccccctgaacaacaccacccccgtgaccggggccagccccggcgggctgcgggagctccagctgcgctccctgacggagatcctcaagggcggggtcctgatccagcggaacccgcagctgtgctaccaggacaccatcctctggaaggacatcttccacaagaacaaccagctggcgctgaccctcatcgacaccaaccgcagccgggcctgccacccctgctcccccatgtgcaagggcagccgctgctggggcgagtccagcgaggactgccagtccctgacgcggaccgtgtgcgccgggggctgcgcccgctgcaaggggcccctgccgaccgactgctgccacgagcagtgcgccgcgggctgcaccggccccaagcacagcgactgcctcgcctgcctgcacttcaaccactccgggatctgcgagctgcactgccccgccctcgtgacgtacaacaccgacaccttcgagagcatgcccaacccggagggccggtacaccttcggggcctcctgcgtcacggcctgcccctacaactacctgagcaccgacgtgggctcctgcaccctggtgtgccccctccacaaccaggaggtcaccgcggaggacgggacgcagcgctgcgagaagtgcagcaagccctgcgcccgggtgtgctacggcctgggcatggagcacctgcgcgaggtgcgggccgtcacctccgccaacatccaggagttcgccgggtgcaagaagatcttcggcagcctcgcgttcctgccggagagcttcgacggggaccccgcctccaacaccgcccccctgcagcccgagcagctccaggtgttcgagaccctggaggagatcacgggctacctgtacatcagcgcctggccggactccctgcccgacctcagcgtgttccagaacctgcaggtcatccgcgggcggatcctgcacaacggcgcctactccctcaccctgcagggcctggggatcagctggctcggcctgcgctccctgcgcgagctcgggagcggcctggcgctgatccaccacaacacccacctctgcttcgtgcacaccgtgccctgggaccagctgttccggaacccccaccaggccctgctccacacggccaaccgcccggaggacgagtgcgtcggggagggcctggcctgccaccagctgtgcgcgcggggccactgctgggggcccggccccacccagtgcgtgaactgctcccagttcctccgcgggcaggagtgcgtcgaggagtgccgggtgctgcagggcctgccgcgcgagtacgtgaacgcccggcactgcctcccctgccaccccgagtgccagccccagaacggcagcgtcacctgcttcgggccggaggccgaccagtgcgtggcctgcgcccactacaaggacccccccttctgcgtggcgcgctgcccctccggcgtcaagccggacctgagctacatgcccatctggaagttccccgacgaggagggggcctgccagccctgcccgatcaactgcacccactcctgcgtggacctggacgacaagggctgccccgccgagcagcgggccagccccctcacgtccatcatcagcgccgtggtcgggatcctgctggtggtggtcctcggcgtggtgttcggcatcctgatcaagcgccggcagcagaagatccgcaagtacaccatgcggcgcctgctccaggagaccgagctggtcgagcccctgaccccgtccggggcgatgcccaaccaggcccagatgcggatcctcaaggagaccgagctgcgcaaggtgaaggtgctgggcagcggggccttcggcacggtctacaaggggatctggatccccgacggcgagaacgtgaagatccccgtggccatcaaggtcctccgggagaacacctccccgaaggccaacaaggagatcctggacgaggcgtacgtgatggccggcgtggggagcccctacgtcagccgcctgctcggcatctgcctgacctccaccgtgcagctggtgacgcagctcatgccctacgggtgcctgctggaccacgtccgggagaaccgcggccgcctcgggagccaggacctgctgaactggtgcatgcagatcgccaagggcatgtcctacctcgaggacgtgcggctggtgcaccgcgacctggccgcgcggaacgtcctcgtgaagagccccaaccacgtgaagatcaccgacttcggcctggcccgcctgctcgacatcgacgagaccgagtaccacgccgacgggggcaaggtcccgatcaagtggatggccctggagtccatcctgcggcgccggttcacccaccagagcgacgtgtggtcctacggggtgacggtctgggagctcatgaccttcggcgccaagccctacgacgggatccccgcgcgcgagatcccggacctgctggagaagggcgagcggctcccccagccccccatctgcaccatcgacgtgtacatgatcatggtgaagtgctggatgatcgacagcgagtgccgcccgcggttccgcgagctggtctccgagttcagccggatggcccgcgacccccagcggttcgtggtgatccagaacgaggacctgggccccgcctcccccctcgacagcaccttctaccgctccctgctggaggacgacgacatgggggacctcgtcgacgccgaggagtacctggtgccgcagcagggcttcttctgccccgaccccgcccccggggcgggcggcatggtgcaccaccggcaccgcagctccagcacgcggtccgggggcggggacctgaccctcggcctggagccgagcgaggaggaggccccccgcagccccctggccccctccgagggggccggcagcgacgtcttcgacggcgacctcgggatgggcgccgcgaaggggctgcagtccctgccgacccacgaccccagccccctccagcggtactccgaggaccccaccgtgccgctgcccagcgagacggacggctacgtggcccccctgacctgctccccccagccggagtacgtcaaccagcccgacgtgcgcccccagcccccgagcccccgcgaggggcccctcccggccgcccggcccgcgggcgccaccctggagcgccccaagaccctgtcccccggcaagaacggggtggtcaaggacgtgttcgccttcggcggggccgtcgagaacccggagtacctcacgccccagggcggggccgcgccccagccccacccgccccccgccttcagccccgccttcgacaacctgtactactgggaccaggacccgcccgagcggggcgcccccccctccaccttcaagggcaccccgaccgccgagaaccccgagtacctggggctcgacgtgcccgtg

SEQ ID NO: 76529 - RNA, 942 nt, synthetic construct
  misc_feature 1..942: note = P43357 MAGA3
  source 1..942: mol_type = other RNA
atgcccctggagcagcgcagccagcactgcaagccggaggagggcctcgaggcccggggggaggccctgggcctggtgggggcgcaggcccccgccaccgaggagcaggaggccgcctccagctccagcaccctcgtcgaggtgacgctgggcgaggtgcccgcggccgagtcccccgacccgccccagagcccccagggggcctccagcctgcccaccaccatgaactacccgctctggtcccagagctacgaggactccagcaaccaggaggaggagggcccctccaccttccccgacctggagagcgagttccaggccgcgctgtcccgcaaggtcgccgagctcgtgcacttcctgctgctcaagtaccgggcccgcgagcccgtgacgaaggccgagatgctgggcagcgtcgtggggaactggcagtacttcttcccggtgatcttctccaaggccagctccagcctgcagctcgtcttcggcatcgagctgatggaggtggaccccatcgggcacctgtacatcttcgcgacctgcctcggcctgagctacgacgggctgctcggcgacaaccagatcatgcccaaggccggcctgctgatcatcgtgctcgccatcatcgcccgggagggggactgcgcccccgaggagaagatctgggaggagctgtccgtcctggaggtgttcgagggccgcgaggacagcatcctcggggacccgaagaagctgctgacccagcacttcgtgcaggagaactacctcgagtaccggcaggtccccggctccgaccccgcgtgctacgagttcctgtggggcccccgcgccctggtggagaccagctacgtgaaggtcctccaccacatggtgaagatctccgggggcccgcacatcagctacccccccctgcacgagtgggtgctgcgggagggggaggag

SEQ ID NO: 76530 - RNA, 495 nt, synthetic construct
  misc_feature 1..495: note = Q17RY6 LY6K
  source 1..495: mol_type = other RNA
atggccctgctcgccctgctgctcgtggtcgcgctgccccgcgtgtggaccgacgccaacctgaccgcccggcagcgcgacccggaggacagccagcggacggacgagggcgacaaccgcgtgtggtgccacgtctgcgagcgggagaacaccttcgagtgccagaacccccgccggtgcaagtggaccgagccctactgcgtgatcgccgccgtgaagatcttcccccgcttcttcatggtcgcgaagcagtgctccgccgggtgcgccgccatggagcggccgaagcccgaggagaagcgcttcctcctggaggagcccatgcccttcttctacctgaagtgctgcaagatccggtactgcaacctcgagggcccgcccatcaacagctccgtgttcaaggagtacgcggggagcatgggcgagtcctgcgggggcctgtggctggccatcctcctgctgctcgccagcatcgccgccggcctgtccctgagc

SEQ ID NO: 76531 - RNA, 1032 nt, synthetic construct
  misc_feature 1..1032: note = P40199 CEAM6
  source 1..1032: mol_type = other RNA
atgggccccccgagcgcccccccctgccgcctgcacgtgccctggaaggaggtcctcctgaccgcctccctgctcaccttctggaacccgcccacgaccgcgaagctgaccatcgagagcacccccttcaacgtggccgaggggaaggaggtgctgctcctggcccacaacctgccccagaaccggatcggctactcctggtacaagggggagcgcgtcgacggcaacagcctcatcgtggggtacgtgatcggcacgcagcaggccaccccgggccccgcctactccgggcgggagaccatctaccccaacgcgagcctgctgatccagaacgtcacccagaacgacacgggcttctacaccctccaggtgatcaagtccgacctggtgaacgaggaggccaccgggcagttccacgtctaccccgagctgccgaagcccagcatctccagcaacaactccaaccccgtggaggacaaggacgccgtggccttcacctgcgagcccgaggtccagaacacgacctacctctggtgggtgaacggccagagcctgccggtgtccccccgcctgcagctcagcaacgggaacatgaccctgaccctgctctccgtcaagcggaacgacgcgggcagctacgagtgcgagatccagaaccccgcctccgccaaccgcagcgaccccgtgacgctgaacgtgctgtacggcccggacgggcccaccatctcccccagcaaggccaactaccggcccggcgagaacctcaacctgagctgccacgccgcgtccaacccgcccgcccagtacagctggttcatcaacgggaccttccagcagtccacccaggagctgttcatccccaacatcacggtcaacaacagcggctcctacatgtgccaggcccacaacagcgccaccggcctcaaccgcaccaccgtgacgatgatcaccgtgtccgggagcgcccccgtcctgtccgcggtggccaccgtgggcatcaccatcggggtcctggcccgggtggccctcatc

SEQ ID NO: 76532 - RNA, 1347 nt, synthetic construct
  misc_feature 1..1347: note = P19544 WT1
  source 1..1347: mol_type = other RNA
atgggcagcgacgtgcgcgacctgaacgccctcctgcccgccgtcccgtccctggggggcgggggcgggtgcgcgctccccgtgagcggcgccgcccagtgggcccccgtgctggacttcgcccccccgggcgcgtccgcctacgggagcctgggcgggcccgccccccccccggcccccccccccccgcccccccccccgccccactccttcatcaagcaggagcccagctggggcggggcggagccccacgaggagcagtgcctctccgccttcaccgtccacttcagcggccagttcaccggcacggccggggcctgccggtacggcccgttcgggcccccccccccgtcccaggccagctccggccaggcgcgcatgttccccaacgccccctacctgcccagctgcctggagtcccagccggccatccggaaccagggctacagcaccgtgaccttcgacgggaccccctcctacggccacacgcccagccaccacgccgcccagttcccgaaccactccttcaagcacgaggaccccatggggcagcagggcagcctcggggagcagcagtactccgtgccccccccggtctacggctgccacacccccaccgacagctgcaccggcagccaggcgctgctgctccgcacgccctactccagcgacaacctgtaccagatgacctcccagctggagtgcatgacctggaaccagatgaacctcggggccaccctgaagggcgtggccgccgggagctccagctccgtgaagtggacggagggccagagcaaccactccaccgggtacgagagcgacaaccacaccacccccatcctgtgcggcgcccagtaccggatccacacgcacggcgtcttccgcgggatccaggacgtgcggcgcgtgccgggcgtcgcgcccaccctcgtgcggtccgccagcgagacctccgagaagcgccccttcatgtgcgcctaccccgggtgcaacaagcggtacttcaagctgagccacctgcagatgcactcccgcaagcacaccggcgagaagccgtaccagtgcgacttcaaggactgcgagcggcgcttcagccggtccgaccagctcaagcgccaccagcggcgccacacgggggtgaagcccttccagtgcaagacctgccagcggaagttcagccgctccgaccacctgaagacccacacccggacgcacaccggcaagaccagcgagaagcccttcagctgccgctggccctcctgccagaagaagttcgcccgcagcgacgagctggtccggcaccacaacatgcaccagcgcaacatgaccaagctccagctggccctg

SEQ ID NO: 76533 - RNA, 2106 nt, synthetic construct
  misc_feature 1..2106: note = P06731 CEAM5
  source 1..2106: mol_type = other RNA
atggagagcccctccgccccgccccaccgctggtgcatcccctggcagcggctgctcctgaccgccagcctgctcaccttctggaaccccccgacgaccgcgaagctgaccatcgagtccacccccttcaacgtggccgagggcaaggaggtcctgctcctggtgcacaacctgccccagcacctcttcgggtacagctggtacaagggcgagcgcgtggacgggaaccggcagatcatcggctacgtcatcgggacgcagcaggccacccccggcccggcctactccggccgcgagatcatctaccccaacgccagcctgctgatccagaacatcatccagaacgacaccgggttctacaccctccacgtgatcaagtccgacctggtgaacgaggaggcgacgggccagttccgggtctaccccgagctgcccaagccgagcatctccagcaacaactccaagcccgtggaggacaaggacgccgtggccttcacctgcgagcccgagacccaggacgccacctacctctggtgggtcaacaaccagagcctgcccgtgtccccgcgcctgcagctcagcaacgggaaccggacgctgaccctgttcaacgtgacccgcaacgacaccgcgtcctacaagtgcgagacgcagaaccccgtcagcgcccggcgctccgacagcgtgatcctcaacgtgctgtacggccccgacgcccccaccatctccccgctgaacaccagctaccggagcggggagaacctcaacctgtcctgccacgccgccagcaacccccccgcgcagtactcctggttcgtcaacggcaccttccagcagagcacgcaggagctgttcatccccaacatcaccgtgaacaactccggcagctacacctgccaggcccacaactccgacaccgggctcaaccgcacgaccgtgaccaccatcacggtctacgccgagccgcccaagcccttcatcaccagcaacaactccaaccccgtggaggacgaggacgccgtggccctgacctgcgagccggagatccagaacaccacgtacctgtggtgggtcaacaaccagagcctccccgtgtccccccggctgcagctgagcaacgacaaccgcaccctcaccctgctgtccgtgacccggaacgacgtcggcccgtacgagtgcgggatccagaacaagctcagcgtggaccactccgaccccgtcatcctgaacgtgctgtacggccccgacgaccccacgatcagcccgtcctacacctactaccgccccggcgtgaacctcagcctgtcctgccacgcggccagcaacccccccgcccagtacagctggctgatcgacgggaacatccagcagcacacccaggagctcttcatctccaacatcaccgagaagaacagcggcctgtacacctgccaggccaacaactccgccagcgggcactcccggacgaccgtcaagaccatcaccgtgagcgcggagctgccgaagccctccatcagctccaacaacagcaagcccgtggaggacaaggacgccgtcgccttcacgtgcgagcccgaggcccagaacaccacctacctctggtgggtgaacggccagtccctgccggtgagcccccgcctgcagctctccaacgggaaccggaccctgacgctgttcaacgtcacccgcaacgacgcccgggcgtacgtgtgcggcatccagaacagcgtgtccgccaaccgcagcgaccccgtcaccctggacgtgctctacggccccgacaccccgatcatctccccccccgacagcagctacctgtccggggccaacctgaacctcagctgccactccgccagcaacccctccccgcagtacagctggcgcatcaacggcatcccccagcagcacacgcaggtgctgttcatcgcgaagatcacccccaacaacaacgggacctacgcctgcttcgtctccaacctggccaccggccggaacaacagcatcgtgaagtccatcacggtgagcgcctccgggaccagccccggcctctccgccggcgcgaccgtcgggatcatgatcggcgtgctggtgggggtcgccctgatc

SEQ ID NO: 76534 - RNA, 2175 nt, synthetic construct
  misc_feature 1..2175: note = Q99661 KIF2C
  source 1..2175: mol_type = other RNA
atggccatggacagctccctgcaggcccgcctcttccccggcctggcgatcaagatccagcggagcaacgggctgatccactccgccaacgtgcgcaccgtcaacctcgagaagagctgcgtgtccgtggagtgggccgagggcggggccaccaagggcaaggagatcgacttcgacgacgtcgccgcgatcaacccggagctgctgcagctcctgcccctgcaccccaaggacaacctccccctgcaggagaacgtgacgatccagaagcagaagcggcgcagcgtgaactccaagatcccggcccccaaggagagcctgcggtcccgcagcacccggatgtccaccgtcagcgagctccgcatcaccgcccaggagaacgacatggaggtggagctgcccgccgcggccaactcccggaagcagttcagcgtgcccccggcccccacgcgcccctcctgccccgccgtcgccgagatcccgctgcggatggtgagcgaggagatggaggagcaggtgcactccatccgcgggagctccagcgcgaaccccgtcaacagcgtgcggcgcaagtcctgcctcgtgaaggaggtcgagaagatgaagaacaagcgggaggagaagaaggcccagaacagcgagatgcgcatgaagcgggcccaggagtacgactccagcttccccaactgggagttcgcccgcatgatcaaggagttccgggccaccctggagtgccaccccctgaccatgaccgacccgatcgaggagcaccgcatctgcgtgtgcgtgcggaagcgccccctcaacaagcaggagctggcgaagaaggagatcgacgtcatctccatccccagcaagtgcctgctcctggtgcacgagcccaagctgaaggtggacctcacgaagtacctggagaaccaggccttctgcttcgacttcgccttcgacgagaccgcctccaacgaggtcgtgtaccgcttcaccgcccggccgctggtgcagaccatcttcgagggcggcaaggcgacgtgcttcgcctacgggcagaccggcagcgggaagacccacaccatgggcggggacctctccggcaaggcccagaacgccagcaagggcatctacgccatggcgtcccgcgacgtcttcctgctgaagaaccagccctgctaccggaagctcgggctggaggtgtacgtcacgttcttcgagatctacaacggcaagctgttcgacctcctgaacaagaaggccaagctgcgcgtgctcgaggacgggaagcagcaggtgcaggtcgtgggcctgcaggagcacctggtgaacagcgccgacgacgtcatcaagatgatcgacatgggctccgcctgccggaccagcgggcagaccttcgcgaactccaacagctcccgcagccacgcctgcttccagatcatcctccgggccaagggccgcatgcacgggaagttctccctggtggacctggccggcaacgagcggggggccgacaccagcagcgcggaccgccagacgcggatggagggcgccgagatcaacaagtccctcctggccctgaaggagtgcatccgcgccctcggccagaacaaggcccacacccccttccgggagagcaagctgacccaggtgctgcgcgactccttcatcggggagaacagccggacctgcatgatcgcgacgatctcccccggcatcagctcctgcgagtacaccctcaacaccctgcgctacgccgaccgggtcaaggagctgagcccgcactccgggcccagcggcgagcagctgatccagatggagaccgaggagatggaggcctgctccaacggggccctcatccccggcaacctgagcaaggaggaggaggagctgtccagccagatgtccagcttcaacgaggccatgacgcagatccgcgagctcgaggagaaggcgatggaggagctgaaggagatcatccagcagggccccgactggctggagctctccgagatgaccgagcagccggactacgacctggagaccttcgtgaacaaggccgagagcgccctggcccagcaggcgaagcacttcagcgccctccgggacgtgatcaaggccctgcgcctggccatgcagctcgaggagcaggcctcccgccagatcagctccaagaagcggccccag

SEQ ID NO: 76535 - RNA, 339 nt, synthetic construct
  misc_feature 1..339: note = Q5H943 KKLC1
  source 1..339: mol_type = other RNA
atgaacttctacctgctcctggccagctccatcctgtgcgccctcatcgtgttctggaagtaccgccggttccagcgcaacaccggcgagatgagctccaacagcaccgcgctggccctggtccggccctccagctccgggctcatcaacagcaacacggacaacaacctggccgtgtacgacctgtcccgcgacatcctcaacaacttcccgcacagcatcgcccggcagaagcgcatcctggtgaacctgtccatggtcgagaacaagctcgtggagctggagcacaccctgctcagcaagggcttccggggggcctccccccaccgcaagagcacc

SEQ ID NO: 76536 - RNA, 303 nt, synthetic construct
  misc_feature 1..303: note = P01350 GAST
  source 1..303: mol_type = other RNA
atgcagcgcctgtgcgtgtacgtcctcatcttcgccctggccctggcggccttcagcgaggcctcctggaagccccggagccagcagccggacgcccccctcggcaccggggccaaccgcgacctggagctgccctggctcgagcagcagggccccgcgtcccaccaccggcgccagctggggccgcagggccccccccacctggtggccgaccccagcaagaagcaggggccgtggctcgaggaggaggaggaggcctacggctggatggacttcggccggcgctccgccgaggacgagaac

SEQ ID NO: 76537 - RNA, 4068 nt, synthetic construct
  misc_feature 1..4068: note = P35968 VGFR2
  source 1..4068: mol_type = other RNA
atgcagagcaaggtgctgctcgccgtcgccctgtggctgtgcgtggagacccgcgcggcctccgtgggcctccccagcgtctccctggacctgccgcggctcagcatccagaaggacatcctgaccatcaaggccaacacgaccctgcagatcacctgccgcgggcagcgggacctcgactggctgtggcccaacaaccagtccggcagcgagcagcgcgtggaggtgaccgagtgctccgacgggctgttctgcaagacgctcaccatccccaaggtcatcggcaacgacaccggggcctacaagtgcttctaccgggagaccgacctggccagcgtgatctacgtgtacgtccaggactaccgctcccccttcatcgcgagcgtgtccgaccagcacggcgtggtctacatcacggagaacaagaacaagaccgtggtgatcccgtgcctgggcagcatctccaacctcaacgtcagcctgtgcgcccggtaccccgagaagcgcttcgtgcccgacgggaaccggatctcctgggacagcaagaagggcttcaccatcccctcctacatgatcagctacgccgggatggtgttctgcgaggccaagatcaacgacgagtcctaccagagcatcatgtacatcgtcgtggtggtcggctaccgcatctacgacgtggtgctgagcccgtcccacgggatcgagctcagcgtcggcgagaagctggtgctgaactgcaccgcgcggacggagctcaacgtcggcatcgacttcaactgggagtacccctccagcaagcaccagcacaagaagctggtgaaccgcgacctgaagacccagtccgggagcgagatgaagaagttcctctccaccctgaccatcgacggcgtgacgcggagcgaccaggggctgtacacctgcgccgcctccagcggcctcatgaccaagaagaactccaccttcgtccgcgtgcacgagaagcccttcgtggccttcggcagcgggatggagtccctggtcgaggccacggtgggcgagcgggtgcgcatccccgcgaagtacctggggtacccgccccccgagatcaagtggtacaagaacggcatccccctcgagagcaaccacaccatcaaggccgggcacgtcctgaccatcatggaggtgtccgagcgggacaccggcaactacacggtgatcctgaccaacccgatcagcaaggagaagcagtcccacgtcgtgagcctcgtggtctacgtgcccccccagatcggcgagaagtccctgatcagccccgtggacagctaccagtacgggaccacccagacgctgacctgcaccgtctacgccatcccgcccccccaccacatccactggtactggcagctcgaggaggagtgcgccaacgagccctcccaggccgtgagcgtgaccaacccgtacccctgcgaggagtggcgctccgtcgaggacttccagggcgggaacaagatcgaggtgaacaagaaccagttcgcgctgatcgagggcaagaacaagacggtgagcaccctggtcatccaggccgccaacgtgtccgccctctacaagtgcgaggccgtgaacaaggtcgggcggggcgagcgcgtgatcagcttccacgtgacccggggccccgagatcaccctgcagcccgacatgcagccgacggagcaggagtccgtcagcctgtggtgcaccgcggaccgctccaccttcgagaacctcacctggtacaagctggggccccagcccctgccgatccacgtgggcgagctccccacccccgtgtgcaagaacctggacacgctgtggaagctcaacgccaccatgttcagcaactccaccaacgacatcctgatcatggagctgaagaacgccagcctgcaggaccagggggactacgtctgcctcgcccaggaccgcaagaccaagaagcggcactgcgtggtgcgccagctgacggtcctggagcgggtggcccccaccatcaccggcaacctcgagaaccagaccacgtccatcggggagagcatcgaggtgtcctgcaccgcgagcggcaacccgcccccccagatcatgtggttcaaggacaacgagaccctggtcgaggactccggcatcgtgctgaaggacgggaaccgcaacctcaccatccggcgcgtgcggaaggaggacgagggcctgtacacgtgccaggcctgcagcgtcctggggtgcgccaaggtggaggccttcttcatcatcgagggcgcgcaggagaagaccaacctcgagatcatcatcctggtgggcaccgccgtcatcgccatgttcttctggctgctcctggtgatcatcctgcgcaccgtgaagcgggccaacgggggcgagctcaagacggggtacctgagcatcgtcatggaccccgacgagctgccgctcgacgagcactgcgagcgcctgccctacgacgcctccaagtgggagttcccccgggaccgcctgaagctcggcaagcccctggggcggggcgcgttcggccaggtgatcgaggccgacgccttcgggatcgacaagaccgccacctgccgcaccgtggccgtcaagatgctgaaggagggcgcgacgcacagcgagcaccgggccctcatgtccgagctgaagatcctgatccacatcgggcaccacctcaacgtggtcaacctgctgggcgcctgcaccaagccggggggccccctcatggtgatcgtggagttctgcaagttcggcaacctgagcacctacctgcgctccaagcggaacgagttcgtcccctacaagaccaagggggcccgcttccggcagggcaaggactacgtgggggccatccccgtggacctcaagcgccgcctggacagcatcacgtccagccagtccagcgcgtccagcggcttcgtcgaggagaagtccctgagcgacgtggaggaggaggaggccccggaggacctctacaaggacttcctgaccctggagcacctcatctgctactccttccaggtggccaaggggatggagttcctggccagccggaagtgcatccaccgcgacctggcggcccggaacatcctcctgtccgagaagaacgtcgtgaagatctgcgacttcggcctggcccgcgacatctacaaggaccccgactacgtgcggaagggcgacgcccgcctccccctgaagtggatggcccccgagaccatcttcgaccgggtctacaccatccagagcgacgtgtggtccttcggggtgctgctctgggagatcttcagcctgggcgcgagcccgtaccccggggtcaagatcgacgaggagttctgccgccggctgaaggagggcacgcgcatgcgggcccccgactacaccacccccgagatgtaccagaccatgctcgactgctggcacggggagccgtcccagcgccccacgttcagcgagctggtggagcacctgggcaacctcctgcaggccaacgcccagcaggacggcaaggactacatcgtgctgcccatctccgagaccctcagcatggaggaggactccgggctgagcctgccgacctcccccgtcagctgcatggaggaggaggaggtgtgcgaccccaagttccactacgacaacaccgccggcatctcccagtacctccagaacagcaagcggaagtcccgccccgtgagcgtcaagacgttcgaggacatcccgctggaggagcccgaggtgaaggtgatccccgacgacaaccagaccgactccgggatggtcctggcgagcgaggagctcaagaccctggaggaccggaccaagctgtcccccagcttcggcggcatggtgccgtccaagagccgcgagtccgtggccagcgaggggagcaaccagacctccggctaccagagcgggtaccactccgacgacacggacaccaccgtctacagctccgaggaggccgagctcctgaagctgatcgagatcggcgtgcagaccgggagcacggcccagatcctccagcccgactccggcaccaccctgagctccccccccgtg

SEQ ID NO: 76538 - RNA, 801 nt, synthetic construct
  misc_feature 1..801: note = P09237 MMP7
  source 1..801: mol_type = other RNA
atgcgcctgaccgtgctctgcgccgtctgcctgctgcccggcagcctcgccctgccgctgccccaggaggcggggggcatgtccgagctccagtgggagcaggcccaggactacctgaagcggttctacctgtacgacagcgagaccaagaacgccaactccctcgaggccaagctgaaggagatgcagaagttcttcgggctgcccatcacgggcatgctcaacagccgcgtgatcgagatcatgcagaagccccggtgcggggtgccggacgtcgccgagtactccctgttccccaacagccccaagtggacctccaaggtggtgacctaccgcatcgtcagctacacccgggacctgccccacatcacggtggaccgcctcgtgtccaaggcgctgaacatgtggggcaaggagatcccgctgcacttccggaaggtcgtgtggggcaccgccgacatcatgatcgggttcgcccgcggcgcccacggggacagctaccccttcgacggccccgggaacaccctcgcgcacgccttcgcccccggcaccggcctggggggcgacgcccacttcgacgaggacgagcggtggacggacgggtccagcctgggcatcaacttcctctacgccgcgacccacgagctgggccactccctggggatgggccacagctccgacccgaacgccgtgatgtaccccacctacgggaacggcgacccccagaacttcaagctcagccaggacgacatcaaggggatccagaagctgtacggcaagcgctccaacagccggaagaag

SEQ ID NO: 76539 - RNA, 5460 nt, synthetic construct
  misc_feature 1..5460: note = Q96Q89 KI20B
  source 1..5460: mol_type = other RNA
atggagagcaacttcaaccaggagggcgtgccccgcccgtcctacgtcttcagcgccgaccccatcgcccggccctccgagatcaacttcgacgggatcaagctggacctcagccacgagttctccctggtggcgcccaacaccgaggccaacagcttcgagtccaaggactacctgcaggtgtgcctccgcatccggccgttcacccagagcgagaaggagctggagtccgagggctgcgtccacatcctggacagccagacggtggtgctcaaggagccccagtgcatcctggggcgcctgtccgagaagagctccggccagatggcccagaagttcagcttctccaaggtcttcgggcccgccaccacccagaaggagttcttccagggctgcatcatgcagcccgtgaaggacctcctgaagggccagagccggctgatcttcacctacgggctcacgaactccggcaagacctacaccttccaggggaccgaggagaacatcggcatcctgccgcgcacgctgaacgtgctcttcgacagcctgcaggagcggctgtacaccaagatgaacctcaagccccaccgctcccgggagtacctgcgcctgagcagcgagcaggagaaggaggagatcgcctccaagagcgcgctcctgcggcagatcaaggaggtcaccgtgcacaacgactccgacgacaccctgtacgggagcctcacgaactccctgaacatcagcgagttcgaggagtccatcaaggactacgagcaggccaacctgaacatggccaacagcatcaagttctccgtgtgggtcagcttcttcgagatctacaacgagtacatctacgacctcttcgtgcccgtgtccagcaagttccagaagcgcaagatgctgcggctgtcccaggacgtcaagggctacagcttcatcaaggacctccagtggatccaggtgtccgacagcaaggaggcctaccgcctgctgaagctcggcatcaagcaccagtccgtggcgttcaccaagctgaacaacgccagctcccggagccacagcatcttcaccgtcaagatcctgcagatcgaggactccgagatgagccgcgtgatccgggtgtccgagctcagcctgtgcgacctggccgggtccgagcgcaccatgaagacgcagaacgagggcgagcggctccgcgagaccgggaacatcaacaccagcctgctgaccctcggcaagtgcatcaacgtcctgaagaactccgagaagagcaagttccagcagcacgtgcccttccgggagtccaagctgacgcactacttccagagcttcttcaacggcaaggggaagatctgcatgatcgtgaacatctcccagtgctacctcgcctacgacgagaccctgaacgtcctgaagttcagcgccatcgcgcagaaggtgtgcgtcccggacaccctcaactccagccaggagaagctgttcggccccgtgaagtccagccaggacgtgtccctggacagcaacagcaactccaagatcctgaacgtcaagcgcgccaccatcagctgggagaactccctcgaggacctgatggaggacgaggacctggtggaggagctcgagaacgccgaggagacgcagaacgtggagaccaagctgctggacgaggacctcgacaagaccctggaggagaacaaggccttcatcagccacgaggagaagcgcaagctgctcgacctgatcgaggacctgaagaagaagctcatcaacgagaagaaggagaagctgaccctggagttcaagatccgggaggaggtcacgcaggagttcacccagtactgggcccagcgcgaggcggacttcaaggagaccctcctgcaggagcgggagatcctggaggagaacgccgagcgccggctcgccatcttcaaggacctggtggggaagtgcgacacccgcgaggaggccgccaaggacatctgcgcgacgaaggtggagaccgaggagacccacaactacgtcggcttcgaggacatcatcgactccctgcaggacaacgtggccgacatcaagaagcaggccgagatcgcccacctctacatcgccagcctgcccgacccccaggaggcgaccgcctgcctggagctcaagttcaaccagatcaaggccgagctggccaagacgaagggggagctgatcaagaccaaggaggagctcaagaagcgggagaacgagtccgacagcctgatccaggagctggagacctccaacaagaagatcatcacccagaaccagcgcatcaaggagctcatcaacatcatcgaccagaaggaggacaccatcaacgagttccagaacctgaagagccacatggagaacacgttcaagtgcaacgacaaggcggacacctccagcctgatcatcaacaacaagctcatctgcaacgagaccgtggaggtcccgaaggactccaagagcaagatctgctccgagcggaagcgcgtgaacgagaacgagctgcagcaggacgagccccccgccaagaagggcagcatccacgtgtccagcgccatcaccgaggaccagaagaagtccgaggaggtccggcccaacatcgccgagatcgaggacatccgcgtgctgcaggagaacaacgagggcctccgggccttcctgctgacgatcgagaacgagctcaagaacgagaaggaggagaaggcggagctgaacaagcagatcgtgcacttccagcaggagctgagcctcagcgagaagaagaacctgaccctgtccaaggaggtccagcagatccagagcaactacgacatcgccatcgccgagctccacgtgcagaagtccaagaaccaggagcaggaggagaagatcatgaagctgagcaacgagatcgagaccgccacccgctccatcacgaacaacgtgagccagatcaagctgatgcacaccaagatcgacgagctccggaccctggactccgtcagccagatctccaacatcgacctgctcaacctgcgcgacctgagcaacgggtccgaggaggacaacctcccgaacacccagctggacctgctcggcaacgactacctggtgagcaagcaggtgaaggagtaccggatccaggagcccaaccgcgagaactccttccacagctccatcgaggccatctgggaggagtgcaaggagatcgtcaaggcgagctccaagaagagccaccagatcgaggagctggagcagcagatcgagaagctccaggccgaggtgaaggggtacaaggacgagaacaaccggctgaaggagaaggagcacaagaaccaggacgacctgctcaaggagaaggagacgctgatccagcagctgaaggaggagctccaggagaagaacgtgaccctggacgtccagatccagcacgtggtggagggcaagcgcgccctgtccgagctcacccagggggtcacctgctacaaggccaagatcaaggagctggagacgatcctggagacccagaaggtggagtgcagccacagcgccaagctcgagcaggacatcctggagaaggagtccatcatcctgaagctcgagcgcaacctgaaggagttccaggagcacctgcaggacagcgtgaagaacaccaaggacctcaacgtcaaggagctgaagctgaaggaggagatcacccagctcacgaacaacctgcaggacatgaagcacctgctccagctgaaggaggaggaggaggagaccaaccggcaggagaccgagaagctgaaggaggagctctccgcgagctccgcccgcacccagaacctgaaggccgacctgcagcggaaggaggaggactacgccgacctcaaggagaagctgacggacgcgaagaagcagatcaagcaggtgcagaaggaggtgagcgtcatgcgcgacgaggacaagctgctccggatcaagatcaacgagctggagaagaagaagaaccagtgctcccaggagctggacatgaagcagcgcaccatccagcagctgaaggagcagctcaacaaccagaaggtggaggaggccatccagcagtacgagcgggcctgcaaggacctgaacgtgaaggagaagatcatcgaggacatgcgcatgaccctggaggagcaggagcagacccaggtcgagcaggaccaggtgctcgaggccaagctggaggaggtggagcggctggccacggagctcgagaagtggaaggagaagtgcaacgacctggagaccaagaacaaccagcgcagcaacaaggagcacgagaacaacaccgacgtcctgggcaagctcaccaacctgcaggacgagctgcaggagtccgagcagaagtacaacgcggaccggaagaagtggctcgaggagaagatgatgctgatcacgcaggccaaggaggccgagaacatccgcaacaaggagatgaagaagtacgccgaggaccgggagcgcttcttcaagcagcagaacgagatggagatcctgaccgcccagctcaccgagaaggacagcgacctgcagaagtggcgggaggagcgcgaccagctggtggcggccctcgagatccagctgaaggccctgatctccagcaacgtgcagaaggacaacgagatcgagcagctcaagcggatcatctccgagaccagcaagatcgagacgcagatcatggacatcaagcccaagcgcatctccagcgccgaccccgacaagctgcagaccgagccgctgtccaccagcttcgagatctcccggaacaagatcgaggacggcagcgtcgtgctcgacagctgcgaggtgtccaccgagaacgaccagagcacccgcttccccaagcccgagctggagatccagttcacgcccctgcagccgaacaagatggccgtcaagcaccccgggtgcaccacccccgtgaccgtgaagatcccgaaggcgcggaagcgcaagtccaacgagatggaggaggacctcgtcaagtgcgagaacaagaagaacgccacgccccgcaccaacctgaagttccccatcagcgacgaccggaactccagcgtgaagaaggagcagaaggtcgccatccgcccctccagcaagaagacctactccctgcggagccaggcctccatcatcggcgtgaacctcgcgaccaagaagaaggaggggacgctgcagaagttcggcgacttcctgcagcacagcccgtccatcctccagagcaaggccaagaagatcatcgagaccatgtccagctccaagctgagcaacgtggaggcctccaaggagaacgtcagccagcccaagcgcgccaagcggaagctgtacaccagcgagatctccagccccatcgacatctccgggcaggtgatcctcatggaccagaagatgaaggagagcgaccaccagatcatcaagcgccggctgcgcaccaagacggccaag

SEQ ID NO: 76540 - RNA, 951 nt, synthetic construct
  misc_feature 1..951: note = P43358 MAGA4
  source 1..951: mol_type = other RNA
atgagctccgagcagaagagccagcactgcaagcccgaggagggcgtggaggcccaggaggaggccctggggctcgtcggcgcgcaggccccgaccaccgaggagcaggaggccgccgtgtccagctccagccccctggtgcccgggacgctggaggaggtccccgccgcggagtccgccggcccgccccagagcccccagggggcctccgccctccccaccaccatcagcttcacctgctggcgccagccgaacgagggctccagctcccaggaggaggagggccccagcacgtcccccgacgcggagagcctgttccgggaggccctgtccaacaaggtggacgagctcgcccacttcctgctgcgcaagtaccgggccaaggagctcgtgaccaaggccgagatgctggagcgcgtcatcaagaactacaagcggtgcttccccgtgatcttcgggaaggcgagcgagtccctgaagatgatcttcggcatcgacgtgaaggaggtcgacccggccagcaacacctacaccctcgtgacgtgcctggggctgagctacgacggcctcctggggaacaaccagatcttccccaagaccggcctgctcatcatcgtgctgggcaccatcgccatggagggggactccgccagcgaggaggagatctgggaggagctgggcgtcatgggggtgtacgacggccgcgagcacaccgtgtacggcgagccccggaagctcctgacgcaggactgggtccaggagaactacctggagtaccgccaggtgcccgggtccaacccggcccggtacgagttcctctggggcccccgcgcgctggccgagaccagctacgtgaaggtcctggagcacgtggtgcgggtcaacgcccgcgtgcggatcgcctacccctccctccgcgaggccgcgctgctggaggaggaggagggggtg

SEQ ID NO: 76541 - RNA, 927 nt, synthetic construct
  misc_feature 1..927: note = P43355 MAGA1
  source 1..927: mol_type = other RNA
atgagcctggagcagcgctccctccactgcaagcccgaggaggccctggaggcccagcaggaggcgctgggcctcgtgtgcgtccaggccgccaccagctccagctccccgctggtgctggggaccctcgaggaggtgcccacggccggcagcaccgaccccccccagtccccgcagggggccagcgcgttccccaccaccatcaacttcacgcggcagcgccagccctccgagggcagctccagccgggaggaggaggggccctccaccagctgcatcctggagtccctgttccgcgccgtcatcaccaagaaggtggccgacctcgtgggcttcctgctgctcaagtaccgggcccgcgagccggtcaccaaggcggagatgctggagagcgtgatcaagaactacaagcactgcttccccgagatcttcggcaaggcctccgagagcctgcagctcgtgttcgggatcgacgtcaaggaggccgaccccacgggccactcctacgtgctggtgacctgcctggggctcagctacgacggcctgctgggggacaaccagatcatgcccaagaccggcttcctcatcatcgtcctggtgatgatcgccatggagggcgggcacgccccggaggaggagatctgggaggagctgagcgtgatggaggtctacgacggccgggagcactccgcgtacggggagccccgcaagctcctgacccaggacctggtgcaggagaagtacctcgagtaccggcaggtgcccgacagcgaccccgcccgctacgagttcctgtggggcccgcgggccctggccgagacgtcctacgtcaaggtgctcgagtacgtgatcaaggtcagcgcccgcgtgcggttcttcttcccctccctgcgcgaggcggccctgcgggaggaggaggagggcgtg

SEQ ID NO: 76542 - RNA, 3426 nt, synthetic construct
  misc_feature 1..3426: note = O60732 MAGC1
  source 1..3426: mol_type = other RNA
atgggcgacaaggacatgcccaccgccgggatgccgagcctgctccagtccagctccgagagcccccagtcctgccccgagggcgaggacagccagtcccccctgcagatcccgcagagctcccccgagagcgacgacaccctgtaccccctccagtccccccagagccgctccgagggggaggacagctccgacccgctgcagcggccccccgagggcaaggacagccagtcccccctgcagatcccgcagagctcccccgagggggacgacacgcagagccccctccagaacagccagtccagccccgagggcaaggactccctgagcccgctggagatctcccagagcccccccgagggcgaggacgtgcagtcccccctccagaacccggccagctccttcttcagctccgcgctgctgagcatcttccagtccagccccgagtccacccagagccccttcgaggggttcccccagtccgtcctccagatcccggtgagcgccgcctccagcagcaccctggtgtccatcttccagagctcccccgagagcacccagtcccccttcgagggcttcccccagagcccgctgcagatccccgtctcccgcagcttctccagcacgctcctgtccatcttccagagctcccccgagcggacccagagcaccttcgaggggttcgcccagtccccgctgcagatccccgtgagcccctccagcagctccaccctcctgagcctgttccagtccttcagcgagcgcacgcagtccaccttcgagggcttcgcccagagctccctccagatccccgtgagcccgtccttcagctccaccctggtcagcctgttccagtccagccccgagcggacccagtccacgttcgaggggttcccccagagccccctccagatcccggtgtccagctccagcagctccaccctgctgagcctcttccagtccagccccgagcgcacccactccaccttcgagggcttcccccagagcctgctgcagatccccatgacgtccagcttctccagcaccctcctgtccatcttccagagctccccggagagcgcgcagtccaccttcgagggcttcccccagagccccctgcagatccccgggtccccgagcttctccagcaccctcctgagcctgttccagtccagccccgagcggacgcactccaccttcgagggcttcccccagagccccctccagatcccgatgacctccagcttctccagcaccctgctgtccatcctccagagctcccccgagagcgcccagtccgccttcgaggggttcccccagagccccctgcagatcccggtgtccagctccttcagctacacgctgctctccctgttccagagcagccccgagcgcacccactccaccttcgagggcttcccccagagcccgctgcagatccccgtctccagctccagctccagctccaccctcctgagcctgttccagtccagccccgagtgcacgcagtccaccttcgagggcttcccccagagcccgctccagatcccccagtccccccccgagggggagaacacccacagcccgctgcagatcgtgccctccctgcccgagtgggaggacagcctgtccccccactacttcccgcagagccccccccagggcgaggacagcctctccccccactacttcccgcagagccccccccagggggaggactccctgagcccccactacttcccgcagtccccccagggcgaggacagcctgtccccccactacttcccccagagcccgccccagggggaggactccatgagccccctctacttcccccagtccccgctgcagggcgaggagttccagagctccctgcagagccccgtgtccatctgcagctccagcaccccctccagcctcccgcagagcttccccgagtccagccagtccccccccgagggcccggtccagagccccctgcactccccccagagccccccggaggggatgcactcccagagccccctgcagtcccccgagagcgcccccgagggcgaggactccctcagcccgctgcagatcccccagtcccccctggagggggaggacagcctctccagcctgcacttcccccagtccccgcccgagtgggaggacagcctgagccccctccacttcccccagttcccgccccagggcgaggacttccagtccagcctgcagtcccccgtgagcatctgctccagctccacgagcctgtccctcccccagagcttcccggagtccccccagagcccccccgaggggccggcgcagtcccccctgcagcggcccgtgagctccttcttcagctacaccctggcctccctcctgcagagctcccacgagagcccgcagagcccccccgagggccccgcccagtccccgctgcagagccccgtctccagcttcccctccagcacctccagctccctcagccagtccagccccgtgtccagcttcccgtccagcacctccagctccctgagcaagagctcccccgagagccccctgcagtcccccgtgatcagcttctccagctccacgagcctctccccgttcagcgaggagtccagctcccccgtcgacgagtacaccagctccagcgacaccctgctggagtccgacagcctcaccgactccgagagcctgatcgagagcgagcccctgttcacctacacgctcgacgagaaggtggacgagctggcccgcttcctgctcctgaagtaccaggtgaagcagcccatcaccaaggccgagatgctgaccaacgtcatctcccggtacaccggctacttcccggtgatcttccgcaaggcgcgggagttcatcgagatcctcttcgggatcagcctgcgcgaggtggaccccgacgactcctacgtcttcgtgaacacgctggacctcaccagcgagggctgcctgtccgacgagcaggggatgagccagaaccggctgctcatcctgatcctgtccatcatcttcatcaagggcacctacgccagcgaggaggtcatctgggacgtgctctccgggatcggcgtgcgcgccggccgggagcacttcgccttcggggagccccgcgagctgctgaccaaggtctgggtgcaggagcactacctcgagtaccgggaggtgcccaacagctccccgccccgctacgagttcctgtggggcccccgggcccacagcgaggtcatcaagcgcaaggtggtggagttcctggcgatgctcaagaacacggtccccatcaccttcccgtccagctacaaggacgccctgaaggacgtggaggagcgcgcccaggccatcatcgacaccaccgacgactccacggccaccgagagcgcgtccagctccgtgatgagccccagcttctccagcgag

SEQ ID NO: 76543 - RNA, 1527 nt, synthetic construct
  misc_feature 1..1527: note = P78395 PRAME
  source 1..1527: mol_type = other RNA
atggagcgccggcgcctgtggggcagcatccagtcccggtacatcagcatgtccgtgtggaccagcccccgccggctcgtcgagctggccgggcagtccctgctcaaggacgaggccctggcgatcgccgccctggagctcctgccgcgcgagctgttcccccccctcttcatggccgccttcgacggccggcacagccagaccctgaaggcgatggtgcaggcctggcccttcacgtgcctgccgctcggggtgctgatgaagggccagcacctgcacctcgagaccttcaaggccgtcctggacgggctggacgtgctcctggcccaggaggtgcgcccccggcgctggaagctgcaggtcctcgacctgcggaagaactcccaccaggacttctggaccgtgtggagcggcaaccgcgcgtccctgtacagcttccccgagcccgaggccgcccagccgatgaccaagaagcggaaggtggacggcctctccacggaggccgagcagcccttcatccccgtcgaggtgctggtggacctgttcctcaaggagggggcctgcgacgagctgttcagctacctgatcgagaaggtcaagcgcaagaagaacgtgctccggctgtgctgcaagaagctgaagatcttcgcgatgcccatgcaggacatcaagatgatcctcaagatggtgcagctggactccatcgaggacctggaggtcacctgcacctggaagctcccgaccctggccaagttcagcccctacctgggccagatgatcaacctccgccggctgctgctctcccacatccacgccagctcctacatcagccccgagaaggaggagcagtacatcgcccagttcacgtcccagttcctgagcctgcagtgcctccaggccctgtacgtggacagcctgttcttcctccgcgggcggctggaccagctgctgcgccacgtgatgaaccccctcgagaccctgtccatcaccaactgccggctgagcgagggcgacgtcatgcacctctcccagagcccgtccgtgagccagctgtccgtgctgagcctctccggggtcatgctgaccgacgtgagccccgagcccctgcaggcgctcctggagcgcgcctccgccacgctgcaggacctcgtgttcgacgagtgcggcatcaccgacgaccagctgctggccctcctgcccagcctgtcccactgcagccagctcaccaccctgtccttctacggcaacagcatctccatcagcgccctgcagtccctcctgcagcacctgatcgggctcagcaacctgacgcacgtcctgtacccggtgcccctcgagagctacgaggacatccacggcaccctgcacctggagcgcctcgcgtacctgcacgcccggctgcgcgagctcctgtgcgagctggggcggccctccatggtctggctcagcgccaacccctgcccgcactgcggcgaccgcaccttctacgaccccgagcccatcctgtgcccctgcttcatgccgaac

SEQ ID NO: 76544 - RNA, 426 nt, synthetic construct
  misc_feature 1..426: note = O15392 BIRC5
  source 1..426: mol_type = other RNA
atgggcgcccccaccctgccgcccgcctggcagcccttcctcaaggaccaccgcatcagcaccttcaagaactggcccttcctggaggggtgcgcgtgcacgccggagcggatggccgaggccggcttcatccactgccccaccgagaacgagcccgacctggcccagtgcttcttctgcttcaaggagctcgaggggtgggagcccgacgacgacccgatcgaggagcacaagaagcactccagcggctgcgccttcctgtccgtgaagaagcagttcgaggagctgaccctcggggagttcctgaagctggaccgcgagcgggcgaagaacaagatcgccaaggagaccaacaacaagaagaaggagttcgaggagacggccaagaaggtccgccgggccatcgagcagctcgcggccatggac

SEQ ID NO: 76545 - RNA, 945 nt, synthetic construct
  misc_feature 1..945: note = P43362 MAGA9
  source 1..945: mol_type = other RNA
atgagcctggagcagcgctccccccactgcaagccggacgaggacctcgaggcccagggcgaggacctggggctgatgggcgcccaggagcccaccggggaggaggaggagaccacgagctccagcgactccaaggaggaggaggtgagcgcggccggctccagctcccccccccagagcccgcaggggggcgcctccagctccatcagcgtctactacaccctctggtcccagttcgacgagggcagctccagccaggaggaggaggagccctccagcagcgtggaccccgcccagctggagttcatgttccaggaggccctgaagctcaaggtggcggagctggtccacttcctgctccacaagtaccgggtgaaggagcccgtgaccaaggccgagatgctggagtccgtcatcaagaactacaagcgctacttcccggtgatcttcgggaaggccagcgagttcatgcaggtgatcttcggcaccgacgtcaaggaggtggaccccgccgggcactcctacatcctggtgacggcgctcggcctgagctgcgactccatgctgggggacggccacagcatgcccaaggccgccctcctgatcatcgtcctgggcgtgatcctcaccaaggacaactgcgcccccgaggaggtgatctgggaggccctgtccgtcatgggggtgtacgtgggcaaggagcacatgttctacggggagccgcggaagctgctcacccaggactgggtccaggagaactacctggagtaccgccaggtgcccggcagcgaccccgcgcactacgagttcctgtggggctccaaggcccacgccgagaccagctacgagaaggtgatcaactacctcgtcatgctgaacgcccgggagcccatctgctacccgtccctgtacgaggaggtgctcggggaggagcaggagggcgtg

SEQ ID NO: 76546 - RNA, 1119 nt, synthetic construct
  misc_feature 1..1119: note = Q9UBF1 MAGC2
  source 1..1119: mol_type = other RNA
atgcccccggtgcccggcgtccccttccgcaacgtggacaacgacagccccacctccgtggagctggaggactgggtcgacgcccagcacccgaccgacgaggaggaggaggaggccagctccgcgagctccacgctctacctggtgttcagcccctccagcttctccaccagctccagcctgatcctcgggggccccgaggaggaggaggtgccctccggggtcatcccgaacctgaccgagagcatcccctccagccccccccagggcccgccccaggggccctcccagagccccctgtccagctgctgcagctccttcagctggtccagcttctccgaggagagctccagccagaagggcgaggacaccggcacgtgccaggggctcccggactccgagagctccttcacctacaccctggacgagaaggtggccgagctggtggagttcctcctgctgaagtacgaggccgaggagcccgtcaccgaggccgagatgctcatgatcgtgatcaagtacaaggactacttccccgtgatcctgaagcgggcccgcgagttcatggagctgctcttcggcctggcgctgatcgaggtcgggcccgaccacttctgcgtgttcgccaacacggtgggcctcaccgacgaggggagcgacgacgagggcatgccggagaactccctgctgatcatcatcctcagcgtcatcttcatcaagggcaactgcgcctccgaggaggtgatctgggaggtgctgaacgccgtcggggtgtacgcgggccgggagcacttcgtgtacggggagccccgcgagctgctcaccaaggtctgggtgcagggccactacctggagtaccgggaggtgccccacagctcccccccgtactacgagttcctgtggggcccccgcgcccacagcgagtccatcaagaagaaggtcctcgagttcctggccaagctgaacaacaccgtgcccagcagcttcccctcctggtacaaggacgccctcaaggacgtcgaggagcgggtgcaggccacgatcgacaccgcggacgacgccaccgtgatggccagcgagtccctgagcgtcatgtccagcaacgtgtccttcagcgag

SEQ ID NO: 76547 - RNA, 2463 nt, synthetic construct
  misc_feature 1..2463: note = P21802 FGFR2
  source 1..2463: mol_type = other RNA
atggtgagctggggccgcttcatctgcctggtcgtggtgaccatggccaccctctccctggcccggcccagcttctccctggtcgaggacacgaccctcgagccggaggagccccccaccaagtaccagatcagccagcccgaggtgtacgtggcggccccgggggagtccctggaggtccgctgcctgctcaaggacgccgccgtgatcagctggaccaaggacggcgtgcacctggggcccaacaaccggacggtcctgatcggcgagtacctccagatcaagggggccaccccccgcgactccggcctgtacgcgtgcaccgccagccggaccgtggactccgagacgtggtacttcatggtgaacgtcaccgacgccatcagctccggcgacgacgaggacgacaccgacggggccgaggacttcgtgagcgagaactccaacaacaagcgcgcgccctactggaccaacacggagaagatggagaagcggctgcacgccgtgccggccgccaacaccgtcaagttccgctgccccgccggcgggaaccccatgcccaccatgcggtggctcaagaacggcaaggagttcaagcaggagcaccgcatcgggggctacaaggtgcggaaccagcactggagcctgatcatggagtccgtggtcccgagcgacaagggcaactacacctgcgtggtggagaacgagtacgggtccatcaaccacacgtaccacctggacgtcgtggagcgcagcccccaccggcccatcctccaggcgggcctgcccgccaacgcctccaccgtggtcgggggcgacgtggagttcgtctgcaaggtgtacagcgacgcccagccgcacatccagtggatcaagcacgtggagaagaacggcagcaagtacgggcccgacggcctgccctacctcaaggtcctgaaggccgcgggggtgaacaccaccgacaaggagatcgaggtgctgtacatccgcaacgtcacgttcgaggacgccggcgagtacacctgcctcgccgggaactccatcggcatcagcttccactccgcctggctgaccgtgctgcccgccccgggccgggagaaggagatcaccgcgagccccgactacctcgagatcgccatctactgcatcggggtgttcctgatcgcctgcatggtcgtgacggtgatcctgtgccgcatgaagaacaccaccaagaagcccgacttctccagccagcccgccgtccacaagctcaccaagcggatcccgctgcgccggcaggtgacggtgtccgccgagagctccagctccatgaacagcaacacccccctggtccgcatcaccacccggctctccagcacggcggacacccccatgctggccggcgtgtccgagtacgagctgcccgaggacccgaagtgggagttcccccgcgacaagctcaccctggggaagcccctgggcgaggggtgcttcggccaggtggtcatggccgaggccgtgggcatcgacaaggacaagccgaaggaggcggtgaccgtcgccgtgaagatgctcaaggacgacgccacggagaaggacctgagcgacctggtgtccgagatggagatgatgaagatgatcgggaagcacaagaacatcatcaacctcctgggcgcctgcacccaggacgggcccctgtacgtcatcgtggagtacgccagcaagggcaacctccgcgagtacctgcgggcgcgccggccccccgggatggagtactcctacgacatcaaccgcgtgccggaggagcagatgaccttcaaggacctggtcagctgcacctaccagctcgcccggggcatggagtacctggccagccagaagtgcatccaccgcgacctggccgcccggaacgtgctcgtgaccgagaacaacgtcatgaagatcgcggacttcggcctggcccgcgacatcaacaacatcgactactacaagaagacgaccaacgggcggctgcccgtgaagtggatggcccccgaggccctgttcgaccgcgtgtacacccaccagtccgacgtctggagcttcggcgtgctcatgtgggagatcttcaccctggggggctccccctacccgggcatccccgtggaggagctgttcaagctcctgaaggaggggcaccggatggacaagcccgccaactgcacgaacgagctgtacatgatgatgcgcgactgctggcacgcggtccccagccagcggccgaccttcaagcagctcgtggaggacctggaccgcatcctgaccctcaccacgaacgaggagtacctggacctgtcccagcccctcgagcagtacagcccctcctaccccgacacccggagctcctgcagctccggcgacgacagcgtgttctccccggaccccatgccctacgagccctgcctgccgcagtacccccacatcaacgggagcgtcaagacc

SEQ ID NO: 76548 - RNA, 783 nt, synthetic construct
  misc_feature 1..783: note = P07288 KLK3
  source 1..783: mol_type = other RNA
atgtgggtgcccgtcgtgttcctgaccctcagcgtgacctggatcggcgccgccccgctgatcctgtcccgcatcgtcgggggctgggagtgcgagaagcacagccagccctggcaggtgctcgtggcgtcccgggggcgcgccgtctgcggcggggtgctggtgcacccccagtgggtcctgacggccgcccactgcatccggaacaagagcgtgatcctcctgggccgccactccctgttccaccccgaggacaccggccaggtgttccaggtcagccactccttcccgcaccccctctacgacatgagcctgctgaagaaccggttcctccgccccggggacgactccagccacgacctgatgctgctccggctgtccgagcccgccgagctgaccgacgcggtgaaggtgatggacctcccgacccaggagcccgccctgggcacgacctgctacgccagcgggtggggctccatcgagcccgaggagttcctgacccccaagaagctccagtgcgtcgacctgcacgtgatcagcaacgacgtgtgcgcccaggtccacccgcagaaggtgaccaagttcatgctgtgcgcggggcgctggacgggcggcaagtccacctgcagcggggactccggcgggcccctcgtgtgcaacggcgtcctgcagggcatcaccagctgggggtccgagccctgcgccctgcccgagcggccgagcctctacaccaaggtggtgcactaccgcaagtggatcaaggacacgatcgtcgccaacccc

SEQ ID NO: 76549 - RNA, 2250 nt, synthetic construct
  misc_feature 1..2250: note = Q04609 FOLH1
  source 1..2250: mol_type = other RNA
atgtggaacctgctccacgagaccgacagcgccgtggccaccgcgcgccggccccgctggctgtgcgccggcgccctggtcctcgccgggggcttcttcctgctggggttcctcttcggctggttcatcaagtccagcaacgaggccacgaacatcaccccgaagcacaacatgaaggcgttcctggacgagctgaaggccgagaacatcaagaagttcctctacaacttcacccagatcccccacctggccgggaccgagcagaacttccagctggccaagcagatccagtcccagtggaaggagttcggcctcgacagcgtggagctggcgcactacgacgtgctgctctcctaccccaacaagacgcaccccaactacatcagcatcatcaacgaggacggcaacgagatcttcaacacctccctgttcgagccgcccccccccgggtacgagaacgtcagcgacatcgtgccgcccttctccgccttcagcccccagggcatgcccgagggggacctggtgtacgtcaactacgcccggaccgaggacttcttcaagctcgagcgcgacatgaagatcaactgctccggcaagatcgtgatcgcccggtacgggaaggtgttccgcggcaacaaggtcaagaacgcccagctggcgggcgccaagggggtgatcctgtacagcgacccggccgactacttcgcccccggcgtgaagtcctaccccgacgggtggaacctccccggcggcggggtccagcggggcaacatcctgaacctgaacggggccggcgacccgctcacccccgggtaccccgcgaacgagtacgcctaccgccggggcatcgccgaggccgtgggcctgcccagcatcccggtgcaccccatcgggtactacgacgcccagaagctgctcgagaagatgggcgggtccgcgccccccgacagctcctggcgcggcagcctgaaggtcccgtacaacgtggggcccggcttcacgggcaacttctccacccagaaggtgaagatgcacatccacagcaccaacgaggtcacccggatctacaacgtgatcgggacgctgcgcggcgccgtggagcccgaccggtacgtcatcctcgggggccaccgcgacagctgggtgttcgggggcatcgacccccagtccggcgccgccgtggtccacgagatcgtgcggagcttcgggaccctgaagaaggagggctggcgcccgcggcgcaccatcctgttcgcctcctgggacgcggaggagttcgggctcctgggcagcaccgagtgggccgaggagaactcccggctgctccaggagcgcggcgtcgcctacatcaacgccgacagctccatcgaggggaactacacgctgcgggtggactgcacccccctgatgtacagcctcgtgcacaacctgaccaaggagctgaagtcccccgacgagggcttcgaggggaagagcctctacgagtcctggaccaagaagagcccgtcccccgagttcagcggcatgccccgcatctccaagctggggagcggcaacgacttcgaggtcttcttccagcgcctgggcatcgcgtccgggcgggcccgctacacgaagaactgggagaccaacaagttcagcggctaccccctctaccactccgtgtacgagacctacgagctggtggagaagttctacgacccgatgttcaagtaccacctgaccgtcgcccaggtgcgggggggcatggtgttcgagctcgccaacagcatcgtcctgcccttcgactgccgcgactacgccgtggtgctgcggaagtacgcggacaagatctacagcatctccatgaagcacccccaggagatgaagacgtacagcgtctccttcgacagcctgttctccgccgtgaagaacttcaccgagatcgccagcaagttctccgagcgcctccaggacttcgacaagagcaaccccatcgtgctgcggatgatgaacgaccagctgatgttcctcgagcgcgccttcatcgacccgctggggctgcccgaccggcccttctaccgccacgtcatctacgccccctccagccacaacaagtacgcgggcgagtccttcccgggcatctacgacgccctcttcgacatcgagagcaaggtggacccctccaaggcctggggggaggtgaagcggcagatctacgtcgccgccttcaccgtgcaggcggccgccgagaccctgagcgaggtggcc

SEQ ID NO: 76550 - RNA, 27 nt, synthetic construct
  misc_feature 1..27: note = Linker 1
  source 1..27: mol_type = other RNA
agcggcgggtccggaggttctggcggg

SEQ ID NO: 76551-76552 - skipped (2 entries)

SEQ ID NO: 76553 - RNA, 30 nt, synthetic construct
  misc_feature 1..30: note = Linker 4
  source 1..30: mol_type = other RNA
ggcgggggaggtagcggcgggggaggcacc

SEQ ID NO: 76554 - RNA, 27 nt, synthetic construct
  misc_feature 1..27: note = Linker 5
  source 1..27: mol_type = other RNA
ggcgggggaggtagcggcgggggaggc

SEQ ID NO: 76555 - RNA, 12 nt, synthetic construct
  misc_feature 1..12: note = Linker 6
  source 1..12: mol_type = other RNA
ggccccagcctg

SEQ ID NO: 76556 - RNA, 24 nt, synthetic construct
  misc_feature 1..24: note = Linker 7
  source 1..24: mol_type = other RNA
ggcagcaccgtggccgctccctcc

SEQ ID NO: 76557 - RNA, 24 nt, synthetic construct
  misc_feature 1..24: note = Linker 8
  source 1..24: mol_type = other RNA
accgtggccgctcccagcggctcc

SEQ ID NO: 76558 - RNA, 30 nt, synthetic construct
  misc_feature 1..30: note = Linker 9
  source 1..30: mol_type = other RNA
ggcagcaccgtggccgctccctccgggtct

SEQ ID NO: 76559 - RNA, 15 nt, synthetic construct
  misc_feature 1..15: note = Linker 10
  source 1..15: mol_type = other RNA
ggcgggggaggtagc

SEQ ID NO: 76560 - RNA, 18 nt, synthetic construct
  misc_feature 1..18: note = Linker 11
  source 1..18: mol_type = other RNA
accgtggccgctcccagc

SEQ ID NO: 76561-76562 - skipped (2 entries)

SEQ ID NO: 76563 - RNA, 18 nt, synthetic construct
  misc_feature 1..18: note = Linker 14
  source 1..18: mol_type = other RNA
cccgccgtgcctccaccg

SEQ ID NO: 76564 - RNA, 18 nt, synthetic construct
  misc_feature 1..18: note = Linker 15
  source 1..18: mol_type = other RNA
accgtgagcgacgtcccc

SEQ ID NO: 76565 - RNA, 18 nt, synthetic construct
  misc_feature 1..18: note = Linker 16
  source 1..18: mol_type = other RNA
accggcctggacagcccc

SEQ ID NO: 76566 - RNA, 33 nt, synthetic construct
  misc_feature 1..33: note = Linker 17
  source 1..33: mol_type = other RNA
cactacggcgccgaggctctggaaagagcaggg

SEQ ID NO: 76567 - skipped

SEQ ID NO: 76568 - RNA, 12 nt, synthetic construct
  misc_feature 1..12: note = Linker 19
  source 1..12: mol_type = other RNA
gccgctgcagcc

SEQ ID NO: 76569 - RNA, 45 nt, synthetic construct
  misc_feature 1..45: note = CV Linker
  source 1..45: mol_type = other RNA
ggcgggggaggtagcggcgggggaggctccggtgggggaggctct

SEQ ID NO: 76570 - RNA, 27 nt, synthetic construct
  misc_feature 1..27: note = Prostate-specific antigen precursor (17-25)
  source 1..27: mol_type = other RNA
gccgctcccctgatcctcagcagaatt

SEQ ID NO: 76571 - RNA, 27 nt, synthetic construct
  misc_feature 1..27: note = Prostate-specific antigen precursor (65-73)
  source 1..27: mol_type = other RNA
cactgcatcagaaacaagagcgtgatt

SEQ ID NO: 76572 - RNA, 30 nt, synthetic construct
  misc_feature 1..30: note = Prostate-specific antigen precursor (65-74)
  source 1..30: mol_type = other RNA
cactgcatcagaaacaagagcgtgattctg

SEQ ID NO: 76573 - RNA, 27 nt, synthetic construct
  misc_feature 1..27: note = Prostate-specific antigen precursor (82-90)
  source 1..27: mol_type = other RNA
caccccgaggacaccggccaggtgttc

SEQ ID NO: 76574 - RNA, 27 nt, synthetic construct
  misc_feature 1..27: note = Prostate-specific antigen precursor (188-196)
  source 1..27: mol_type = other RNA
cacccccagaaggtgaccaaattcatg

SEQ ID NO: 76575 - RNA, 27 nt, synthetic construct
  misc_feature 1..27: note = Prostate-specific antigen precursor (243-251)
  source 1..27: mol_type = other RNA
tacaccaaggtggtccactatagaaaa

SEQ ID NO: 76576 - RNA, 30 nt, synthetic construct
  misc_feature 1..30: note = Prostate-specific antigen precursor (178-187)
  source 1..30: mol_type = other RNA
gtgatcagcaacgacgtctgcgcccaggtt

SEQ ID NO: 76577 - RNA, 45 nt, synthetic construct
  misc_feature 1..45: note = Prostate-specific antigen precursor (88-102)
  source 1..45: mol_type = other RNA
caggtgttccaagtcagccactcctttccccatcctctgtacgac

SEQ ID NO: 76578 - RNA, 27 nt, synthetic construct
  misc_feature 1..27: note = Kita-kyushu lung cancer antigen 1 (40-48)
  source 1..27: mol_type = other RNA
ctggtgagacccagctcctctggcctc

SEQ ID NO: 76579 - RNA, 33 nt, synthetic construct
  misc_feature 1..33: note = Trophoblast glycoprotein (104-114)
  source 1..33: mol_type = other RNA
gccgtgctgcccgctggcgcattcgccagaagg

SEQ ID NO: 76580 - RNA, 27 nt, synthetic construct
  misc_feature 1..27: note = Trophoblast glycoprotein (33-41)
  source 1..27: mol_type = other RNA
agccccacctcctctgcctcaagtttc

SEQ ID NO: 76581 - RNA, 27 nt, synthetic construct
  misc_feature 1..27: note = Cyclin-dependent kinase inhibitor 2A (68-76)
  source 1..27: mol_type = other RNA
gccgaggaactgggccacagagacgtg

SEQ ID NO: 76582 - RNA, 30 nt, synthetic construct
  misc_feature 1..30: note = Cyclin-dependent kinase inhibitor 2A, isoforms 1/2/3 (87-96)
  source 1..30: mol_type = other RNA
agagagggcttcctggacaccctcgtggtc

SEQ ID NO: 76583 - RNA, 33 nt, synthetic construct
  misc_feature 1..33: note = Cyclin-dependent kinase inhibitor 2A, isoforms 1/2/3 (87-97)
  source 1..33: mol_type = other RNA
agagagggcttcctggacaccctcgtggtcctt

SEQ ID NO: 76584 - RNA, 27 nt, synthetic construct
  misc_feature 1..27: note = multiple tumor suppressor 1/cyclin-dependent kinase 4 inhibitor p16, partial (7-15)
  source 1..27: mol_type = other RNA
gccagagtggctgagctgctccttctg

SEQ ID NO: 76585 - RNA, 27 nt, synthetic construct
  misc_feature 1..27: note = multiple tumor suppressor 1/cyclin-dependent kinase 4 inhibitor p16, partial (52-60)
  source 1..27: mol_type = other RNA
gccagactggacgtgagggatgcttgg

SEQ ID NO: 76586 - RNA, 27 nt, synthetic construct
  misc_feature 1..27: note = multiple tumor suppressor 1/cyclin-dependent kinase 4 inhibitor p16, partial (63-71)
  source 1..27: mol_type = other RNA
ctgcccgtggacctcgccgaggaactt

SEQ ID NO: 76587 - RNA, 39 nt, synthetic construct
  misc_feature 1..39: note = Cyclin-dependent kinase inhibitor 2A, isoforms 1/2/3 (111-123)
  source 1..39: mol_type = other RNA
ggcagactgcccgtggacctcgccgaggaacttgggcac

SEQ ID NO: 76588 - RNA, 27 nt, synthetic construct
  misc_feature 1..27: note = Cyclin-dependent kinase inhibitor 2A (58-66)
  source 1..27: mol_type = other RNA
agagtggccgagctgctccttctgcac

SEQ ID NO: 76589 - RNA, 30 nt, synthetic construct
  misc_feature 1..30: note = GTPase NRas (55-64)
  source 1..30: mol_type = other RNA
atcctggacaccgccggccaggaggaatac

SEQ ID NO: 76590 - RNA, 2298 nt, synthetic construct
  misc_feature 1..2298: note = P15056 BRAF
  source 1..2298: mol_type = other RNA
atggccgctctgagcggcgggggaggtggcggggcagagcccggacaggccctcttcaacggcgacatggaacctgaggcgggtgctggggccggagcagccgcttcctctgcagccgatccagctatcccggaagaggtgtggaatattaagcaaatgataaaacttacccaggaacacatcgaggccctgttggacaagtttggcggcgagcataaccccccttcaatttacttagaagcgtatgaggaatacacaagtaaactggatgcactacagcagagagagcaacagctcctggagagccttgggaatggaactgacttctccgtctcttcgtcagccagcatggatacggttaccagttcctctagctcctcactgagtgtgttgccaagctctctctccgtatttcagaaccccacagacgtggctaggtcaaatcctaagagcccacagaaacccatcgtccgggtgttcctgcctaacaagcaacgcactgttgtgccagcccgatgcggtgtcaccgtgcgtgatagtctgaagaaagcactcatgatgagaggcttaattccggaatgttgcgctgtatataggatccaggacggggagaagaaacccataggatgggatacagacatctcttggctgaccggcgaagagcttcacgttgaagtgttggagaatgtccctctgactacacataactttgtgcggaagaccttctttacgctagccttctgtgatttttgccgcaaactcctgttccagggttttagatgtcagacttgcgggtacaagttccaccaaaggtgttccaccgaggtgccacttatgtgcgtcaattatgaccagctggatttgctctttgttagcaagttcttcgaacatcaccccattcctcaggaggaagcgtcgctggccgagacagcattaacttctggatcctcaccaagtgctcccgccagcgactccatcggcccgcaaattctgacctctcctagcccctcaaaaagtatcccaatacctcagccctttcggccagctgacgaagatcaccgcaaccagttcggccagcgagacagatccagctctgcccccaatgtgcatattaacacaatcgagcctgtaaatattgatgacctcatcagggatcaagggtttcggggagacggtggctcaaccacggggcttagtgcaactccaccggccagcctgcccggatccttgacaaacgtgaaggctctacagaaatctcctggcccacagcgtgagcgcaagtcgagctcctcaagtgaagatagaaataggatgaaaaccctgggtcggcgagactctagcgatgactgggagatccccgatgggcagattactgtcggccaacgcataggatccggctcattcgggacagtgtacaagggaaaatggcacggtgacgttgcggtgaagatgctcaacgtcaccgcacctacgccacagcagctgcaggcctttaagaacgaagtgggcgtacttagaaaaaccaggcatgttaatatcctgttgttcatggggtatagcacaaagccccaactcgctattgtgactcagtggtgtgagggatcttccctgtaccaccacttacatatcatagaaaccaaatttgagatgattaagctgatcgacatcgcccggcagacagcacagggcatggattacctacacgccaaaagtattatccatcgcgacctcaagagcaacaatattttcctgcacgaggatcttactgtcaagataggtgactttgggttggctaccgtgaaatctagatggtccggctcacatcaattcgaacagctgagtggaagcatcctctggatggccccggaggtcattaggatgcaggataagaacccttattcgtttcaatccgacgtgtacgcattcggcatcgttctgtatgaacttatgacagggcagctgccatactctaatatcaacaatcgtgatcagattatatttatggtgggacggggttatttgagccccgacctctcaaaagtacgaagtaactgccctaaggcgatgaaaagactgatggctgagtgtttaaagaagaaaagggatgagcgccccctgttcccacagatcctagcctccattgaactcctggcacggtctcttcctaagatccacagaagcgcctccgagccctcattgaatagggctggcttccaaaccgaagactttagcctgtacgcctgcgcaagtccaaaaactccgattcaggctgggggatatggcgccttccctgtccac

SEQ ID NO: 76591 - RNA, 3204 nt, synthetic construct
  misc_feature 1..3204: note = P42336 PK3CA
  source 1..3204: mol_type = other RNA
atgccccctagaccaagctccggcgagctgtgggggatccacctcatgccgcccaggattcttgtggaatgcctgttgcctaacggaatgatagtcaccttagagtgtctgcgggaagccacactaatcactattaagcatgagctcttcaaagaagctcgcaagtacccactgcaccagcttctgcaagacgagtcttcatatatctttgttagtgtgacgcaggaggcagaacgagaggaattctttgatgagacccgtagattgtgcgacctcaggctgttccagccctttctgaaagtaattgagcctgtgggtaatcgggaagagaagatcctcaaccgcgaaataggcttcgccatcgggatgccagtctgtgagtttgatatggtgaaagaccccgaagttcaggatttcagaaggaatattttaaacgtgtgcaaggaggcggtcgacctgcgggatcttaatagccctcattcccgcgctatgtacgtgtatccaccgaacgtagagtcttcgcccgaattgcctaagcacatctacaataaactggacaagggacaaattatcgttgtgatatgggtcattgtgtcaccaaacaatgataaacagaagtatacactaaaaatcaaccatgactgtgtgcccgagcaggtcattgccgaagcaatccgaaagaagactagaagcatgctcctgagttccgagcagcttaaactgtgcgttttggaataccaaggcaagtatatcctcaaagtgtgtggttgcgatgagtactttctggagaagtaccctttatctcagtataaatacattaggagctgtataatgctggggcggatgccaaatctcatgcttatggccaaggaatccctgtattcacagttgcccatggactgcttcaccatgccgagttacagccgtcgcatctctacagctaccccttatatgaacggagagacttccacaaaatcactatgggtaattaatagcgcactgagaatcaagatactctgtgccacctacgtgaacgtcaatattagggatatcgacaagatctatgtgcggacgggcatttaccacggcggggaacccctgtgcgacaacgttaacactcagcgagtgccatgcagtaatcctcgctggaacgagtggcttaattacgatatctatattcccgacctgccaagagctgccaggttgtgtctctctatatgctccgtcaaaggacggaagggtgcgaaagaagagcactgtcccctggcatggggcaacatcaatttatttgattacaccgacacactggtgagcgggaagatggccctaaacctctggcctgtaccacatggactggaggatcttttgaatccgattggcgttactggttcgaaccccaataaagaaaccccttgcctggagctcgaattcgactggttttcttccgtggtcaagttcccagatatgtcagtgatcgaggagcacgctaactggagtgtcagccgcgaagccgggttctcctattctcatgcaggactgagcaatagacttgctagggacaacgagctgcgtgaaaatgataaggagcaattgaaagccatctcaacacgggaccccctcagtgaaattaccgagcaggagaaggattttctgtggtcccaccgacactactgtgtgacgatacctgaaatcttaccaaaactgctactcagcgttaagtggaactctagagacgaggtggcgcagatgtattgcctggtaaaagactggcccccgattaagcctgaacaagccatggagcttttggattgtaattacccagaccccatggtcaggggcttcgcagtgcgctgcctggaaaagtatctcactgatgacaaactgtcacagtacttaatccagctggttcaggtgcttaagtacgagcaatatttggataacctcctggtccggtttctactgaaaaaggctctcacaaaccagagaattggccatttctttttctggcacctgaaaagtgagatgcataataagaccgtgagccagaggtttgggcttttgctggaatcctactgtcgcgcctgcggaatgtatttaaagcacctcaaccgacaggtagaggctatggaaaaactgatcaatcttactgacatactgaagcaagagaaaaaggatgaaacacagaaagtgcagatgaagttcttggttgagcagatgcggcgtcctgactttatggatgccctccaaggtttcctgtctcccctaaacccagcacatcagctgggcaatctcagactggaggaatgtaggatcatgtcgagcgccaaacgccctctttggttgaactgggagaatcccgacattatgtccgaactgttatttcagaacaatgagatcattttcaagaacggggatgacctccggcaggatatgctgacccttcaaatcataagaattatggagaatatctggcagaaccagggactggacctaaggatgctcccatacggctgcctgtcaattggtgactgcgtcgggttgatcgaagtggtgcgaaatagtcacacgataatgcaaatccagtgtaagggcggactgaaaggcgctttacagtttaactctcacaccctccatcagtggctgaaggataaaaataagggggagatttatgacgcggcaatcgatcttttcacacgcagctgcgccggatactgtgtcgctactttcattctgggtatcggcgaccggcacaactccaacataatggttaaagatgacgggcaattgtttcatattgatttcggacactttctcgaccacaagaagaaaaagttcggctataaaagagaaagggtgccgtttgtgctgacccaggatttcctaatcgtaatctcaaagggtgcccaggagtgcacaaaaactcgtgaatttgagcgcttccaggagatgtgttacaaggcatacctggccattcggcaacatgctaatctttttatcaacctcttcagcatgatgctggggtctggcatgcctgaattgcagtcctttgacgatattgcctatataagaaagaccctggcattagacaaaacagagcaggaagcgctcgagtacttcatgaagcagatgaatgatgctcaccatggaggctggaccactaaaatggactggatctttcacacgattaagcaacatgccctgaac

SEQ ID NO: 76592 - RNA, 567 nt, synthetic construct
  misc_feature 1..567: note = P01116 RASK
  source 1..567: mol_type = other RNA
atgaccgagtacaagctggtggtcgttggcgccgggggagtgggtaaaagcgctctcacaatccagcttattcaaaaccacttcgtagacgaatatgatcccactatagaggactcctacagaaagcaggtggtcatcgatggcgaaacgtgcctgttggacattttagataccgcagggcaggaggaatattctgccatgagggaccagtacatgcggacaggagagggctttctgtgtgtgttcgcgatcaataacactaaatcatttgaggatattcatcactatcgcgaacaaatcaagcgagttaaagacagtgaggatgtgcctatggtcctagtgggtaataagtgcgacctcccaagccgtaccgtagatacaaagcaggctcaggacctggccagatcctacgggataccgttcatcgaaacctctgcaaaaactaggcagcgggttgaggatgccttttatacacttgtgcgcgagattagacaatacaggctgaagaaaatctcgaaggaagagaaaacccccggatgtgtcaagattaagaaatgcatcataatg

SEQ ID NO: 76593 - RNA, 1242 nt, synthetic construct
  misc_feature 1..1242: note = O75874 IDHC
  source 1..1242: mol_type = other RNA
atgagcaagaaaatctccggcgggtctgtggtcgagatgcagggagacgaaatgaccagaattatatgggagctgatcaaggaaaaactcattttcccctacgttgagcttgatctgcactcatatgacttgggtatcgaaaacagggatgccacaaatgaccaagtgactaaggatgctgcagaggccattaaaaagcataacgtaggcgtgaagtgcgcgacgatcacccctgacgagaaacgggtcgaagagtttaagttaaaacagatgtggaagagtccaaatgggacaatacgcaacatcctgggaggcactgtgttccgagaagctattatctgtaaaaatattccgcgtctagttagcggttgggtgaagcccatcataattgggagacacgcctacggagatcagtatagggcaaccgactttgtcgtgcctggcccaggcaaggtagagatcacatacaccccctccgatgggactcagaaagttacatatctcgtgcataacttcgaggaaggaggtggcgtcgccatggggatgtacaatcaagacaagtctattgaggattttgctcactcgtcattccagatggcactgagcaaaggatggcctctttatctgagtaccaagaacacgatcttgaaaaagtacgacggccggtttaaagatatcttccaggaaatttacgacaagcagtataagtcccaatttgaggcccagaaaatatggtacgaacatcgcctcatcgacgatatggtggctcaggccatgaagtctgagggtgggttcatttgggcgtgcaaaaattatgacggagatgtgcagagcgactccgtcgcacaaggctacggctcactggggatgatgactagtgttctggtgtgtccagatggaaagaccgtagaggccgaagctgcccacggtacagtgactagacactataggatgtaccagaaaggccaggagaccagcacaaaccccatcgcatctatatttgcttggacccgggggctcgcccatcgcgcgaagttagacaataacaaggaactggccttctttgcaaatgctcttgaggaagtctccattgagacgatcgaggccggattcatgactaaagatttggctgcctgcatcaagggcctgcctaacgtgcaacgatcagactatctaaatacattcgaatttatggataaactcggtgagaacctgaagattaaacttgcacaggccaagctg

SEQ ID NO: 76594 - RNA, 1179 nt, synthetic construct
  misc_feature 1..1179: note = P04637 P53
  source 1..1179: mol_type = other RNA
atggaggaaccccagagcgacccttccgtggagccaccgctgtctcaagaaaccttctcagatctctggaagcttctgcccgagaacaatgtcttgagtcctttaccaagccaggccatggacgatctgatgctatcccccgacgatatcgaacagtggtttacagaggaccctggcccagatgaggctcccagaatgcctgaagcagccccaccggttgcgcccgctcctgccgcaccaactcccgccgctcctgcaccagccccctcttggccgctctcgtcaagcgtgcctagtcagaaaacgtaccaagggtcctatggattcaggctgggttttcttcactctggcaccgctaagagcgtaacatgcacttactcccccgccctgaacaaaatgttctgtcagttggcgaagacctgcccagtgcagctctgggtcgactcaacacctcccccagggacccgggtgcgcgcaatggccatttataaacagagtcaacatatgactgaggttgtgcgacgttgtccccaccatgaaagatgcagcgattctgacggactggctcctccacagcacctgataagggtcgagggcaatctccgggtggagtacttagatgaccgcaacacatttagacattccgtagttgtgccgtatgaaccccctgaggtcggttcagattgtaccacgatccactacaattatatgtgcaacagcagttgtatggggggaatgaataggcggccaattctgactatcattacccttgaagactcttccggcaacttgctgggccgcaatagcttcgaggtgcgagtgtgcgcctgtcccgggagagacaggcggacagaagaggagaacctacgtaagaagggagaacctcaccatgagctcccacccggttcgactaaacgcgcactgccgaataacacctcttcctcacctcagccaaagaaaaagccccttgatggcgaatactttacactgcagatcagagggagggagcggttcgaaatgtttcgagagttgaatgaggctctcgaactgaaagacgcccaagcgggaaaggagcctggcggtagtcgcgcccacagctcccatttaaagtctaaaaaggggcagagcacctcaagacacaaaaagctgatgttcaaaacggaaggacccgatagtgac

SEQ ID NO: 76595 - RNA, 567 nt, synthetic construct
  misc_feature 1..567: note = P01111 RASN
  source 1..567: mol_type = other RNA
atgaccgagtacaagctggtggtcgttggcgccgggggagtgggtaaaagcgctctcacaatccagcttattcaaaaccacttcgtagacgaatatgatcccactatagaggactcctacagaaagcaggtggtcatcgatggcgaaacgtgcctgttggacattttagataccgcagggcaggaggaatattctgccatgagggaccagtacatgcggacaggagagggctttctgtgtgtgttcgcgatcaataactcaaaaagttttgctgatattaatctatatcgcgagcaaatcaagcgagttaaagacagcgatgacgtgcctatggtcctcgtgggtaacaagtgcgatctgccaactcgtaccgtagacacaaagcaggcccatgaacttgcaaaatcctacgggataccgttcatcgagacctctgccaagactagacagggagttgaagatgctttttatacactggtgagggagattcggcagtaccgcatgaaaaagttgaattcgtcagacgacggcacccaaggctgtatggggctcccctgcgtcgtgatg

SEQ ID NO: 76596 - RNA, 1440 nt, synthetic construct
  misc_feature 1..1440: note = P31749 AKT1
  source 1..1440: mol_type = other RNA
atgagcgacgtggccatcgtcaaggagggctggctgcacaaaagaggggaatacattaagacctggaggccccggtatttcctccttaaaaacgatggaacatttataggttacaaggagcgccctcaggacgttgatcaacgagaagctccactgaataacttctccgtggcacagtgccagttgatgaaaactgagcgtccgagacccaatacgtttatcattaggtgtttacagtggaccacagtaatcgaacggactttccatgtggagacccctgaggaacgcgaggaatggacaaccgccattcaaactgtcgcggacggcctgaagaagcaggaggaggaagagatggattttagatctgggtcaccaagtgacaacagcggagctgaagagatggaagtgtccctagccaaacccaagcacagggttacaatgaatgagttcgagtatctcaaactgcttggcaagggtacctttgggaaagtgatcctggtcaaggaaaaggcaacgggacggtactatgccatgaaaatattgaagaaagaggtgatcgtagctaaggatgaagttgcacatactctcaccgagaaccgcgtgctgcagaattctcgacaccctttcctgacagccctcaaatactcgtttcagactcatgacagattatgcttcgtcatggaatatgctaacggcggcgagctgtttttccacctttcaagggagcgggtgtttagcgaagatcgtgcccgcttctacggggcggagattgtgagtgcattggactacctgcactccgaaaagaatgtcgtttatagagatctaaaactcgagaacctgatgcttgacaaggatggacatatcaagattaccgacttcggtctgtgtaaagaaggcatcaaggacggggccacaatgaaaaccttttgcggaacgccagagtacttggctcccgaggtgctcgaagataatgactatggcagggccgtagattggtggggtctgggggtggtcatgtacgagatgatgtgtggacggttacctttctataaccaagaccacgaaaagctgtttgagctcatacttatggaggaaattcgattcccacgcactctgggcccggaggcaaaatctttgctaagcggcctgctcaagaaggatcccaaacagagactggggggaggttccgaagacgctaaggagatcatgcagcataggtttttcgccggcattgtgtggcagcacgtttacgaaaaaaagctttcacctccatttaaaccccaagtgacaagtgagaccgatactcggtatttcgacgaggaatttacagcgcagatgatcaccatcacgcctccagatcaggacgatagcatggagtgcgtcgactctgaacgcagaccccacttcccgcaattttcctactcagccagcgggaccgca

SEQ ID NO: 76597 - RNA, 3912 nt, synthetic construct
  misc_feature 1..3912: note = O75533 SF3B1
  source 1..3912: mol_type = other RNA
atggccaagatcgctaaaacccacgaggacattgaagcacagataagagagatccaaggcaagaaagccgcgctggatgaagctcagggggtgggactcgacagcacaggttactatgatcaggagatttacggcgggtccgactctaggttcgccggatatgtcacttcaatcgcagccacggaacttgaggatgacgatgacgattacagtagctccacctctctgttgggccagaagaaacccggttatcatgctcctgttgcattactgaacgacattccacaatcgacagagcagtacgatccgtttgccgaacaccggccccctaagatcgctgaccgcgaggatgaatataagaaacatcgacgtactatgataatctcaccagagagactagaccccttcgccgacgggggaaagacccctgatccaaaaatgaatgcgaggacatacatggacgtgatgcgggagcagcacctcaccaaggaagagcgcgaaattagacagcaactggcagagaaagccaaggctggcgaacttaaggtagtgaacggcgccgcagctagccagccccctagtaaaaggaagcggcgctgggatcagactgccgaccagacaccaggggcgaccccgaaaaagctgtcctcttgggatcaagccgagacgcccggacatactcctagcttgcgatgggacgagaccccaggtagagcaaaaggctccgaaacacccggggctactcctggatcaaagatctgggatccaacccccagtcacacaccggccggcgctgccacccctggtaggggggacacgcccggacacgcaactccaggccatggcggggccacaagctctgctcggaaaaatcgttgggatgagacccctaagactgaacgcgacacacccggacacggttccggctgggcggagaccccaagaacggatagggggggagactcaattggcgaaacccccacacctggtgcaagcaagcggaaaagtcgatgggacgagactccagcctctcagatggggggctccaccccggtcctcacacccggaaagactcctatcggcaccccagctatgaacatggccacacccacccctgggcatataatgagcatgactccagagcagctgcaagcatggcgctgggaaagagagattgatgaaaggaatcggcccctgtcggacgaggaactcgatgccatgtttccggagggatacaaagtgttacctccacccgctggttatgttcctatccgcacgcccgccagaaagctgacagcaaccccaactcctcttggcgggatgaccggattccacatgcagacagaggacaggaccatgaaatctgtgaacgatcagccctccggcaatttgccatttctgaagccggacgatattcagtacttcgacaagctactcgtcgatgtggacgaatcaactctgagtcctgaggaacaaaaagagcgtaagatcatgaaacttctgttgaagatcaaaaacggtacacccccaatgcggaaggcggctctccgacagattacggataaggccagagagtttggggcaggccccctgttcaatcagatattacctctgctcatgagcccaacccttgaagaccaggagaggcacctgttggtaaaagttatcgatcgcattctatataagctggacgacctcgtgcggccctacgtccataaaatcctggtggtgatagaacctcttctgattgatgaggactattacgccagagtcgaaggaagggagatcatctccaacttggctaaggccgcaggcctcgctactatgatttctacaatgcgcccggatatcgacaatatggatgagtatgttcgaaacaccacagcccgggcgtttgccgtggtagctagcgcactggggattccatcattactgcccttcctaaaagccgtgtgcaagagtaagaaatcctggcaagctcgtcacactggaataaagatcgtccagcagattgccatcctcatgggttgtgcaatcctgcctcatcttagaagcttggtggaaattatagagcacggcctggttgacgaacagcaaaaagtgaggaccatctctgcgctcgccattgctgccctggcagaggctgccacgccatacgggatcgaatcatttgatagtgtccttaagcccctgtggaaaggaattcgccagcatcggggcaagggtttggcagccttcctcaaagctatcgggtacctgatacctttaatggacgcggagtatgccaattactataccagagaggtgatgctgatcctaattagggaatttcagagcccggatgaggaaatgaagaagatcgtactcaaagttgtgaagcagtgctgtggcacagacggagtcgaggcaaactacattaaaactgaaatcctgcccccattcttcaagcacttttggcaacaccgaatggctcttgatcgccggaattatagacagttggtggacaccacagtcgagctggccaacaaagtgggcgccgctgagataatttccaggatcgttgatgacctcaaggacgaagcagagcagtaccgtaagatggtgatggaaactattgagaaaatcatggggaacctgggagccgcggatatagaccataagttagaggaacaactgatcgatggcattctttatgctttccaggagcagaccacggaagactctgtaatgttgaatggttttgggacagtcgtgaacgccctcggaaaacgcgttaagccttacctgccccagatctgcggcaccgtgctatggcggctgaataacaaatcggcaaaggtcagacaacaggccgctgatctcattagcaggactgcagtggtaatgaagacatgtcaggaggaaaaactgatgggtcaccttggcgtggttttgtacgagtatctgggggaggaatacccagaggtcttaggatccatcctcggcgccctgaaggcgatagtgaatgtgattgggatgcataaaatgacccctcccatcaaggaccttctgccacgattgactccgatcctcaaaaaccggcacgaaaaggtccaggagaattgcattgatctggttggacgcatcgctgacagaggcgccgaatatgtgtcagcaagggagtggatgcggatttgtttcgagctactggaactcctgaaggcccacaaaaaggctatacgaagagccaccgtgaacacatttggttacatcgcaaaagctattgggcctcatgatgtacttgccacgttgctgaataacttaaaggtccaagagcgccagaatagggtgtgcaccactgttgcgatcgccattgtggcagaaacatgtagtcccttcaccgtcctcccagctctgatgaacgagtatcgtgtgcccgaacttaatgttcagaacggagtgctgaaatctctaagctttctcttcgagtacatcggcgagatgggtaaggactatatatacgccgtaacacctctgttggaagatgctctgatggaccgggacttagtccacagacagactgcatccgccgtggtgcaacatatgtcactcggcgtctacgggtttggatgcgaggatagcctgaatcaccttctgaactatgtttggccaaacgtgttcgaaacctctccccatgtaatccaggccgtgatgggcgctttggaggggctcagggtcgcgattggaccttgtcgcatgctgcagtactgcctacaaggcctgtttcacccggcacgaaaagtgagagacgtttattggaagatctacaattccatttatatcggtagtcaggatgcccttatagctcactacccacggatttataacgacgataagaatacgtacatcaggtacgagctcgactatatcctg

SEQ ID NO: 76598 - RNA, 468 nt, synthetic construct
  misc_feature 1..468: note = P42771 CDN2A
  source 1..468: mol_type = other RNA
atggagcccgccgctggcagctccatggaaccttctgcagactggctggccaccgcggctgccagagggagggtggaggaagtccgggcactccttgaggccggagctctgccaaacgcaccgaattcatacggtcgccgacccatccaggttatgatgatgggcagtgcccgtgtggctgaattgttactgctacacggggccgagcctaactgcgcggatccagcaacactcactagacccgtacatgacgccgctagggagggattcctggatacgcttgtggtcctgcaccgggccggcgcacgcttggacgtgagagatgcttggggtaggctccctgttgacctggccgaagagctggggcatcgggatgtggcgcgctatctccgagccgcagctggaggcaccagaggcagcaatcacgccaggattgacgctgccgaagggccatccgatatacccgac

SEQ ID NO: 76599 - RNA, 3630 nt, synthetic construct
  misc_feature 1..3630: note = P00533 EGFR
  source 1..3630: mol_type = other RNA
atgagacccagcggcaccgccggggctgcactgctcgcccttctggcggctttgtgccctgcctccagggcattagaggaaaagaaagtgtgtcagggaacatctaacaagctgactcaactaggtacgttcgaggaccactttctctcactgcagcggatgttcaataactgcgaagtcgttcttggcaatctggagatcacctacgtgcagcgcaactatgatttgagttttctcaaaacaattcaggaagtagccgggtacgtgctgatagctctgaatactgtcgagcgaatcccactcgagaacttacaaattatccgtggaaatatgtattacgaaaacagctatgcactggccgtgctttccaattacgacgctaacaagaccggcttgaaagagctgccgatgagaaatctacaggaaattctccatggtgccgttaggttctctaacaatcccgcgctgtgtaacgtggagtcgatccagtggcgggatatagtctcaagcgactttcttagtaatatgtccatggatttccagaaccacctggggtcttgccaaaagtgtgaccctagctgcccaaacggatcctgttggggcgcaggcgaggaaaattgccagaagttgacaaaaatcatttgtgcccagcagtgctcagggcgctgtagaggaaagagtcccagcgattgctgccataaccaatgtgctgccggttgcaccggccctagggagtctgactgtctcgtgtgccggaaatttcgcgatgaagcaacttgtaaggacacatgcccacccctgatgttatataatcctaccacgtaccagatggatgtaaacccagaggggaaatactccttcggagctacttgtgttaagaagtgcccgcgaaattatgtggtcaccgaccacggctcatgtgtgagagcctgcggtgcggatagctacgaaatggaggaggacggggtgaggaaatgtaagaaatgcgaaggaccctgccggaaggtctgtaacggcatcggcattggggagtttaaagacagtctgtctatcaatgccacaaacataaagcatttcaaaaattgcacttccattagcggagatctccacatccttcctgttgcatttcgtggtgactcgttcacccacacaccacccctggatcctcaggaattggacattctaaagaccgtgaaggagatcacgggctttctgctcatccaagcttggccagaaaaccgcactgatctgcatgccttcgagaatcttgagattataagagggaggacaaaacagcacggacagttctctctggctgtagtgtccttgaacatcacctcactcggcctgcggagtttaaaggaaattagcgacggtgatgtcatcatatccgggaataaaaacctgtgttatgccaatactattaactggaagaaactatttggcacatctggacagaagaccaagatcatcagcaaccgaggcgagaattcatgcaaagcaacggggcaagtgtgtcatgccctctgcagtcccgaaggatgttggggtccggagcctcgcgactgcgtttcctgtagaaacgtgagcaggggccgggaatgcgtcgataagtgtaatctgcttgagggggagccccgcgaattcgtggagaactctgaatgcattcagtgccacccagagtgtttgcctcaggctatgaatatcacctgcacaggaagaggccccgacaactgtattcagtgcgcgcactacatagatggtccacattgtgtaaaaacttgccccgcaggggttatgggcgagaataacaccctggtgtggaagtatgccgacgctggacacgtctgtcatctctgccaccctaattgtacatacggctgcactgggccaggactggaaggttgtccgaccaacggccccaaaatcccttcaattgccacagggatggtgggagcacttctgttgctcctggtcgtggccttaggcatcggtctgtttatgaggcgtcggcatatcgttcgaaagagaaccctaaggcgcctcctgcaagagcgggaacttgtggagccattgactcccagtggggaagctcctaatcaggccctgctcagaattctgaaggagacggagttcaaaaagataaaagtattaggcagcggagcatttggcacagtctataaggggctgtggatcccagaaggagagaaagtgaagattcccgttgcgatcaaggaacttagggaggctacctccccgaaagccaacaaggaaattttggacgaggcatacgtgatggcctctgtcgataatcctcacgtgtgccgcctcctgggcatctgcctaacttcgaccgtacagctgataacacagctcatgccattcggttgtctgcttgactacgtgcgagagcacaaagataacatcgggagccaatatttgctgaattggtgcgttcagattgctaagggaatgaactacttagaagaccggcgtctcgtccatagagatctggccgcaaggaacgtgcttgtgaaaaccccccagcacgtcaagatcactgactttggcctggctaaattgctcggtgccgaggaaaaggagtatcatgcggaaggcgggaaggttcctattaaatggatggccctggagtccatcctacaccgcatatacacacaccagtcagatgtgtggagttatggagtgacggtatgggagctgatgaccttcggctctaagccctacgacgggattccagctagcgaaatctcctcaattctcgagaaaggagaacggctgcctcaacccccaatctgtactatagatgtctatatgatcatggtgaagtgctggatgattgacgcagatagcagaccgaaatttagggagcttatcattgagttctctaagatggcccgagaccctcagcgctacttggttatccagggcgatgaacggatgcatctgccctccccaacagacagtaatttttacagagctttaatggacgaggaagatatggacgatgtggtcgacgccgatgagtatctcataccccaacagggtttctttagctctccttccacctcaaggacaccactgcttagtagcctgtcggcaacttccaacaattctaccgtggcgtgtattgaccgtaacgggctacagagctgccccatcaaggaagattcattcctccagcgctacagttccgaccctacgggagccctgaccgaggattctatcgacgatacattcttgccggttccagagtatattaatcaaagcgtgcccaaacggcctgctggctccgtacagaacccagtctaccacaatcagcccctgaaccctgccccgtcaagagacccccattatcaggatccacacagcactgcagtgggtaatcctgaatacttaaacaccgtgcaacccacatgtgtcaatagtacttttgactctccagctcattgggcccagaagggctcccaccagatcagcctcgacaaccctgattatcagcaagacttctttcccaaagaggcaaagccaaatgggattttcaaaggatcgaccgccgaaaacgctgagtacctgagggttgcgccgcagtcatctgaatttataggcgcc

SEQ ID NO: 76600 - RNA, 540 nt, synthetic construct
  misc_feature 1..540: note = P78358 CTG1B
  source 1..540: mol_type = other RNA
atgcaggccgagggcagagggaccggaggtagcacaggcgacgctgatgggcccggaggccctggtatcccagacgggccgggaggcaacgcaggcgggcccggagaagccggtgcgactggcgggaggggacctcggggcgctggtgccgcacgcgcctccgggccaggaggcggcgctccccgagggcctcacggaggtgcagcctctggcctgaatgggtgctgtcgttgcggagctagaggcccagagtcaaggctccttgaattctacctggccatgccctttgcgacgcctatggaggcagaattggcccggcgcagtttagctcaagatgccccaccgctgcccgtgcctggtgtcctactcaaggagttcaccgttagcgggaacattctgacaataagacttactgcagctgaccataggcagctgcagttgtccatctcttcgtgtctccagcaactgtcactgctcatgtggattacccagtgctttttaccagtgttcctggcccagccccctagcggccagcggcgc

SEQ ID NO: 76601 - RNA, 3765 nt, synthetic construct
  misc_feature 1..3765: note = P15941 MUC1
  source 1..3765: mol_type = other RNA
atgacccccggcacacagagccctttctttctgctccttctgttgactgtgttaacggtcgttaccgggtccggacacgcctcttcaacaccaggtggcgagaaggaaactagtgctacccaaagaagctccgtgccgtcttcgacagagaaaaacgcagtatcaatgaccagcagtgtgctgtcctctcatagccccgggtccggatcaagtactacacagggccaggacgtcaccctagcccctgcgacggaaccagctagcggttctgccgcaacttgggggcaggatgtgacctccgttcccgtgacaaggcctgccctcggatcaactaccccacccgctcacgacgtcacaagcgcacctgataataagccagccccgggcagtaccgctccccctgcccatggcgtgacgtctgcgccagacactcggcccgcacctgggtccacagccccacccgctcacggagtaaccagcgccccggatactcgccctgcacccggttcgacagctccacctgcccatggcgttacctctgcgcccgacacgcgaccagcccccgggtccaccgcacctccagctcacggagtgacatcagccccggatactcgtcccgctcctggcagtaccgccccacccgcacacggtgtcacaagcgcccctgacactagaccagctcccgggtccaccgcgccgcctgcacatggagtgacatctgccccagataccaggcccgctcctggcagcactgcccccccagcacacggcgtgacgtcagcccctgacacacggcccgctccagggagtaccgccccgcctgcacatggagtcacttccgcgcccgatacccgcccagctcccggtagcacagcccctccagcacacggcgttacctctgcccccgacactagacctgctccggggtcaacagccccacccgcacacggagtgacgagtgctcctgataccaggccagcccccggcagcactgcgcctccggcccatggtgtaacatccgctcccgacacccggccagcacctgggtctacagcccccccagctcacggcgtgacttcggcccctgacacccgccccgcaccaggaagcacggcgccgcctgcccatggcgtcacctccgctcccgatacacgaccagcccccgggtcaactgcacctccagctcacggagtgaccagtgcccccgacacaagacctgcaccgggttctactgccccacccgctcatggcgttaccagcgcgcctgatacgaggcccgccccagggtccacagcacctcccgctcacggagtgacctcagccccagacactcggcctgccccgggcagcacagctcccccagcacacggtgtcacctctgcccctgatactcgtcccgcgccagggtccaccgctcctcccgcccatggcgtgacaagtgcaccggacacgcgcccagcccctggaagcaccgctcccccagcacacggcgtaacttctgcccccgatacaagacctgcgccggggtccaccgctcccccagcccatggagttacatcagcacctgacactaggcccgcccctggtagtaccgctccacccgcccacggcgtgacgagcgcacctgatacacggccagctcccgggtcgaccgccccgcctgcgcacggagtcacttccgccccagacacccgacccgcacctggctctacagctccacccgcccatggtgtgactagcgctccggatacccgccctgcacccgggtcaacagccccacctgcccacggcgtcacgagtgctcccgacaccagaccagcgcccggatccactgcacctccagcccatggcgtgacatctgctccggacaccaggcccgcccctgggagcactgcaccacccgcccacggagttacatccgctcctgatacccggccagcgcccggctcaacggcccctccggcacatggtgtgactagcgctccagacacccgccccgcccctgggagtacagcacccccagcccacggagtaacctctgctcctgatactagacccgccccaggctccacagcgccgcctgcacacggtgtcaccagcgcccccgacacaaggccagctcccggctcgactgcccctccagctcatggggtgacctcagcacccgatacgcgtcctgccccgggatctacagctccacccgcccacggcgttaccagtgcacctgacactcggccagcgcccgggtccaccgcccctcccgctcatggagtgacaagcgccccagatactcgaccggcacctggctctaccgctcccccagcccacggtgtcacgagcgcacctgacacaagacccgccccagggtccaccgctcctcccgcgcatggagtgacttcagccccggatacaaggccagcacctggcagtaccgctcccccagcccacggtgtaactagcgcccccgacacacgccctgcaccgggctctaccgctccacccgcccacggggtgacgtccgcgcctgatactcggcccgctccaggatcaaccgcccctcccgcacatggcgttacaagtgccccagacaccagacctgctccggggagcacagcacccccagcccacggagtcacttccgcgcctgataccaggcccgctccaggctctacggcccctcccgcacatggtgtgacatcggccccggacactcgcccagctcctgggagcaccgcccccccagcacacggagtgacatcagctcccgacacccgacctgcccccggctccactgcgccacctgcccacggtgtcaccagtgcaccggataaccggcccgctctgggctctacagccccacctgttcataatgtgacgagcgcatccgggtcagcttctggaagcgccagtactcttgtgcacaacggcacctccgcccgtgcgacaaccactcccgctagcaaatctacaccattctcaatcccttcccatcacagtgacacccccacgactctggcaagccattcgacaaagaccgatgcctcttccacccaccacagctcagtaccgcctttgactagttctaatcattccacaagcccacaactctcaaccggggtcagttttttctttctgagcttccacatttccaacctgcagtttaattctagcctcgaggacccctccacagattactatcaggaattacagagagacatatcagagatgttcctgcaaatctacaaacagggaggctttcttggtttgtctaacattaagttcaggcctgggagtgtggttgtgcagctgactctagcttttcgcgagggaacgatcaatgtccatgatgtggaaacccagttcaaccaatataagacagaggccgcatcgcggtacaatctcactattagcgacgtttccgtgtctgatgtaccatttcccttctcagcccagagcggcgctggcgtccctgggtggggaatcgcgctgcttgtgctggtgtgcgtcttggttgccctcgcaatagtgtatctgatcgctttagccgtatgtcagtgcagaaggaaaaactacggtcaactggacattttcccagcacgagatacctatcaccccatgtccgaatacccgacataccacacccatggccgctatgtgcctcccagttctactgaccggagcccatacgagaaggtctcagccgggaatggaggctccagtctcagctatacgaaccccgctgtggccgcgacctctgcaaatctt

SEQ ID NO: 76602 - RNA, 1260 nt, synthetic construct
  misc_feature 1..1260: note = Q13641 TPBG
  source 1..1260: mol_type = other RNA
atgcccggcgggtgcagcagaggacctgccgctggtgacggcaggctgcggctcgcacgccttgccctggtgttgttagggtgggtctcctcttcaagtccaaccagctccgcgtcttcgttctcaagcagtgctccgtttctggcctccgcagtttctgcccagccccctctaccagatcaatgtcccgctctctgcgagtgtagcgaagcagcccgaacagtgaagtgcgtaaaccgtaatctgactgaggtgcctacggaccttccagcttacgtcagaaacctgttcttgaccggaaatcagctcgccgtgctgcccgcgggcgcatttgccaggcggcctccactggctgaactcgccgcattaaacctgtccggttcacgccttgatgaggttagagctggggccttcgaacacttgccgagtctgaggcagctagacctcagccataatcccctggcggatctttctccttttgccttctccggatcaaacgcaagcgtgagtgctccatctcccctggtcgagttgatcctcaatcacattgtgcctccagaggacgaacggcagaaccgctcctttgagggcatggtagttgccgctctgttagccggccgagcactgcaagggctcagaaggcttgaactggccagcaatcatttcttgtatctaccccgggatgtgctggctcagctcccgtcgctgcgtcaccttgacctgtctaacaattccttggtctcactcacatacgtgagttttcgcaacctgactcatttagagagcctgcacctagaggataatgcgctcaaagtgctgcacaacggaacccttgcagaattgcagggtctgcctcatataagagtcttcctcgacaataacccctgggtttgtgattgccacatggccgacatggtgacatggctgaaggagaccgaagtagtgcagggcaaagataggcttacttgtgcttatccagagaagatgcggaaccgagtcctgttggaactcaattccgccgacctggactgcgatcctatcttacccccatctctgcaaacaagctacgtgtttctagggattgttctcgcactgatcggagccattttccttttggtgctgtatctcaaccgcaaaggcatcaagaagtggatgcataatataagagacgcttgtagggatcacatggagggttaccactatcggtacgagatcaacgccgacccccgcctgaccaatttatcaagtaactccgatgtc

SEQ ID NO: 76603 - RNA, 3765 nt, synthetic construct
  misc_feature 1..3765: note = P04626 ERBB2
  source 1..3765: mol_type = other RNA
atggagctggccgctctctgcagatggggccttctgttggcattactgccccctggggccgcgagcacccaggtgtgtacaggaactgacatgaagctaaggctcccagcttccccggaaacgcacctggatatgcttcggcatctgtaccaaggttgccaggtcgttcagggcaacttggagctcacctatctgcccacaaatgcctctctgtcattcctccaggacatccaagaagtgcaggggtacgtattaattgcacacaaccaggtgcgccaggtccctctgcaacgacttcgtatagtgagaggaactcagttgtttgaggataattatgccctggctgttctagacaacggcgatccactcaataacaccacacccgtgaccggtgcaagtcctgggggactgagggaacttcagctgcggagcttgactgagatcctcaaaggcggcgtcctgattcagcgcaatccacaattatgttaccaggacacaatcctgtggaaggatattttccataaaaacaatcagctcgcccttaccctgatcgacacgaacagatccagggcttgccacccctgttctcctatgtgcaaggggtcgcggtgttggggagagtcaagcgaagattgccaaagtttgactcgcaccgtgtgtgccggtggctgcgcgcgatgtaaagggccactaccgacagactgctgccatgagcagtgtgcagccggatgcactggccccaagcactccgattgtctggcttgcctccactttaatcattctggtatatgtgaactgcactgccctgcccttgtaacctataacacagacaccttcgagagcatgccaaatcccgaggggagatacacgtttggagcatcctgtgttactgcttgcccttataactacctgtcaacagatgtgggcagttgtaccttggtctgcccactccataatcaggaagtgactgccgaggacggcacacagaggtgtgaaaagtgcagcaaaccctgcgcgcgggtgtgttacgggctgggaatggagcacttacgtgaagtccgcgccgttacctctgcaaacatccaagagttcgctggttgcaagaaaatttttggctccctggccttcctaccggagtcatttgacggggatcctgctagcaacacggcccccctccagccagaacagctgcaggtgttcgagacccttgaagagatcacaggatatttgtacattagtgcatggcctgactctctgcccgatctctccgtatttcaaaatctgcaggtgatcagaggcaggatacttcacaacggtgcctatagcctgactttgcaggggctcggcatttcgtggctgggattacggtctctgcgagaactaggctccgggctcgctctgatccatcacaatacccatctttgtttcgtccacacagtgccatgggaccagttgtttcgcaacccccatcaagcgctgctccacactgcaaatagacctgaggatgagtgcgttggagaaggtctggcctgtcaccagttatgcgctaggggccattgttgggggccaggaccgacccagtgcgtgaactgttcacagttcctgcggggccaagagtgcgtcgaagagtgtcgcgtgcttcagggtttgcccagagaatacgtaaatgccaggcactgcctcccttgccatccagagtgtcagccccaaaacgggagtgttacatgcttcggccctgaggcagaccagtgtgtggcctgcgctcactataaggatccacccttttgtgtcgcccgttgcccgagcggagtgaaacctgacctgtcctacatgccaatttggaagttccccgatgaagagggcgcatgtcagccttgccccatcaattgtacccactcttgcgtcgacctagatgacaaggggtgtccagcggaacagcgggctagccctctgacttcaatcattagtgccgtggttggaatactcctggtggtagtccttggtgtggtttttggcatcttgattaaacgaagacaacagaagatcaggaaatatacgatgcgccggctgttacaggagacagagctcgtggaacccctgaccccatccggggcaatgccgaaccaggcccaaatgagaatacttaaggagactgaactgaggaaagtcaaggtgttgggaagcggcgctttcggtaccgtatacaaagggatttggatccctgacggcgagaatgtgaagatccccgttgccattaaggtcctccgcgaaaacacatctccaaaagcaaataaggagatcctggatgaggcttacgtgatggccggagtgggctcaccctatgtcagtcgactactggggatttgcctcaccagcactgttcagctggtgacacagcttatgccttacggatgcttgctggaccatgtgcgggaaaaccgtggcagattaggttcccaggatctcctgaattggtgtatgcaaatagcgaaagggatgtcttatcttgaggacgtaaggctggtccaccgcgatctagccgctcggaacgtgctcgttaagtcgccaaaccatgtgaaaatcacggactttggactggcaagattgctggatattgacgaaaccgagtaccacgccgatggcggtaaggtccccatcaagtggatggctttagaaagcatcctcaggcgacgcttcactcatcagtccgacgtgtggtcatatggcgttacagtgtgggagctgatgacctttggggccaaaccttacgatggaattccggcacgggagataccagaccttctggaaaagggcgagagattgccccagcctccaatctgcacaattgatgtatatatgatcatggtcaaatgttggatgattgacagtgaatgcaggccccgtttccgcgagctcgtgtctgaatttagccggatggcgagagaccctcaaaggttcgtggtcatccagaatgaggatctggggccggcctcccccctagactcaactttttaccgaagcctgcttgaggatgacgatatgggagacctcgttgatgctgaagagtacctggtgccacagcagggcttcttttgtcctgaccccgccccaggtgcagggggaatggtacaccaccggcatcgctcttccagtaccagaagcggcggtggcgatttgacgctggggttagaaccttctgaggaggaagctcccaggtccccactcgccccgtcagagggagcaggcagtgacgtgttcgatggggacctgggaatgggcgccgctaagggtcttcaaagcctgcctacccacgatccctcgccattgcagcggtattccgaagaccccacagtccctctcccatctgagactgacgggtacgtggcgcccctgacctgcagccctcagccggaatatgttaaccagccagatgtgcgaccccaacctccctcaccaagagagggacctctacccgccgcacgcccagctggcgccacactggagaggcctaaaactcttagtccgggtaagaatggcgtcgtgaaggacgttttcgcctttgggggagctgtggaaaaccccgagtacctcaccccacagggcggggcagcccctcagccccatccacctcccgcgttctccccggcttttgataatctgtattactgggaccaggatccacctgaacgtggagcccccccatctacgttcaaaggcacacccaccgcagagaaccctgaatatttgggtttagacgtcccggta

SEQ ID NO: 76604 - RNA, 942 nt, synthetic construct
  misc_feature 1..942: note = P43357 MAGA3
  source 1..942: mol_type = other RNA
atgcccctggagcagagaagccaacactgcaagcctgaagagggcctcgaagccaggggggaggctcttggactggtgggtgcacaggccccagcgaccgaagagcaggaggctgcctcctcttcaagtacattggtcgaagttactttaggcgaggtgccggcagccgaaagccccgaccctccacagtccccccaaggggcttcttcgctgcctacgaccatgaactacccactatggtcacagagctatgaggatagttccaatcaggaggaagagggaccctctacattccctgacctcgaaagcgagtttcaggcagccctgtcccggaaagtagctgaacttgtgcatttcctgttgctcaagtaccgcgcccgagagccagtcactaaagcggagatgctgggctcagtggttggtaactggcaatattttttcccggtgatctttagtaaggcaagctcttccctgcagctcgtcttcgggattgaattaatggaggtggatcccataggacacctgtacatctttgccacctgtcttggcttgtcatatgacggcctgctaggggataatcagattatgcctaaagctggactcctgatcattgtacttgccatcatagcacgtgaaggtgactgcgctccagaggaaaagatctgggaggagctgagcgttttggaagtgttcgagggcagagaagatagtattctcggggaccccaagaaactgttaacacagcattttgtccaagagaactacctggaatataggcaggtgcctggatctgatccagcctgttacgagttcctctggggcccccgggcgcttgtggagacctcctacgtcaaggttctgcaccatatggtgaaaatcagcggtgggccgcacatttcgtatcctcccttgcacgaatgggtactacgcgagggagaagag

SEQ ID NO: 76605 - RNA, 495 nt, synthetic construct
  misc_feature 1..495: note = Q17RY6 LY6K
  source 1..495: mol_type = other RNA
atggccctgctcgctcttctgttggtggtcgcattacccagagtttggaccgacgccaacctgacagcgaggcagcgggatcctgaggacagccaacgcactgatgaaggcgacaatcgagtgtggtgccacgtatgtgagcgtgaaaacacgttcgagtgccagaatccaagaaggtgtaagtggaccgaaccgtactgcgtgatcgctgccgtcaaaatttttccccggttctttatggtggcaaagcagtgttccgccgggtgcgctgcaatggagcgccctaaaccagaggaaaagagattcctactcgaggaacccatgccttttttctatctgaaatgttgcaagataaggtactgtaaccttgagggaccacccatcaattcttcagtttttaaggagtatgccggtagtatgggcgaaagctgcgggggactgtggttggctattctcctgctgctcgcctccatcgcggcaggcttatctctgtcg

SEQ ID NO: 76606 - RNA, 1032 nt, synthetic construct
  misc_feature 1..1032: note = P40199 CEAM6
  source 1..1032: mol_type = other RNA
atgggcccccctagcgccccaccgtgcagactgcacgtgccctggaaggaggtcctccttaccgcttccctgttgacattctggaaccctccaactacggcaaaattaaccatcgaatctacaccctttaatgttgccgaggggaaggaagtgctgctactcgcgcataacctgcctcagaataggattggatactcatggtataaaggtgagcgggtagacggcaacagtcttatagtggggtacgtcatcggaactcaacaggctaccccaggccccgcctatagcggtcgcgaaacaatttaccctaatgcatccctgttgatccagaacgtgacccagaatgatactgggttctatacactccaagttattaagtctgacctggtgaacgaggaggccaccggacagtttcacgtctacccagaactgccgaaaccctcgatctcaagcaataacagtaatcctgtggaggataaggacgctgtagcattcacgtgtgaaccagaggttcagaacactacctatctctggtgggtgaatggccagtccttacccgtctctcctcgactgcaacttagcaacggcaatatgacattgactctgctatccgtgaagcgtaacgatgccgggtcatacgagtgcgaaatacagaacccagctagtgccaatagaagcgaccccgtgaccctcaacgtcctgtacggaccggatggtcctacaatctctccctccaaagcgaattataggccaggcgagaaccttaatctgtcatgtcatgcagccagcaaccctcccgctcagtacagttggtttattaatgggaccttccagcaatctacgcaggaattgtttatcccaaacattactgttaataactccggaagctatatgtgccaggcccacaattcggcaacaggcctcaaccggaccactgtgacaatgatcaccgtatctggttccgctcccgtgctgtcagccgtcgcgacggtggggataaccattggagttttagcccgcgtggcactgatc

SEQ ID NO: 76607 - RNA, 1347 nt, synthetic construct
  misc_feature 1..1347: note = P19544 WT1
  source 1..1347: mol_type = other RNA
atgggcagcgacgtgagagatctgaacgccctccttcccgctgtcccttccctggggggaggtggcgggtgcgcattgccagtttctggagccgcgcagtgggctccggtgttagacttcgccccccctggcgcatcagcctacggtagtctggggggaccagctccccctccagcaccccctccaccgccccctccaccccctcacagctttatcaagcaagagccatcctggggcggcgccgaaccccatgaggaacagtgtctatctgctttcaccgtacacttttcggggcagttcacaggaactgccggtgcgtgcaggtatggcccgtttgggcctcccccaccttcacaggcaagcagtggacaagcccggatgttccccaatgctccatacctcccctcctgtctggagtctcagcctgccattcgcaaccagggctatagcacggtgacctttgatggtacaccatcctacgggcatactccgtcacaccatgcagctcagttccccaatcacagttttaaacacgaagaccctatgggacaacagggcagccttggcgagcagcagtattctgtcccaccccctgtgtacgggtgccataccccaacagattcctgtaccggatcacaagccctgttgctccgaactccctatagcagtgacaacctgtaccagatgacatctcagctggagtgcatgacctggaatcaaatgaacctcggtgcgacgttaaagggcgttgccgcagggtccagctcgtctgtgaaatggactgaaggacagtccaatcactcaaccggctacgagagtgataaccatacaactccgatactgtgtggtgctcagtatcgtatccacacccacggggtcttcagaggcattcaggacgtgaggcgggtacctggagttgccccaacacttgtgcgcagcgcttccgaaacctctgagaagagaccctttatgtgcgcctaccctggctgtaataaaaggtatttcaagttgagccatctgcaaatgcactcacggaagcatacgggggagaaaccctaccagtgcgattttaaggactgtgaacgccgattcagtagatccgatcagctaaaaaggcaccagcggcgtcatactggagtcaagccattccaatgcaaaacatgccagcgcaagtttagcagatctgaccacctcaagacccacactaggacacataccggtaaaacgtcagagaagcctttcagttgtcggtggcccagctgccagaaaaagtttgcacgatccgatgaactggtgcgccaccataacatgcaccagagaaatatgaccaaacttcaactggccttg

SEQ ID NO: 76608 - RNA, 2106 nt, synthetic construct
  misc_feature 1..2106: note = P06731 CEAM5
  source 1..2106: mol_type = other RNA
atggagagcccctccgcccctccacacagatggtgcatcccgtggcagaggctgctccttaccgcttctctgttgacattctggaacccccctactacggcaaagttaaccattgaatcaacaccatttaatgtggccgagggcaaagaagtcctgctactcgttcataacctgccccaacaccttttcgggtacagttggtataagggagagcgggtggacggtaatcgccagataatcggctacgtaattgggactcagcaggcgacccctggaccagcttatagcggccgagaaatcatttaccccaacgcctccctgttgatccaaaatataatccagaacgatacaggtttttataccctccatgtgattaaatctgacctggtcaatgaggaggcaactgggcagttccgtgtgtaccctgaactgccaaagccgtcgatctcaagcaacaatagtaaacccgttgaggataaggacgccgtggcttttacatgtgaacctgagacccaggatgcaacgtatctctggtgggtcaacaatcaatccttaccagtgtctcccagactgcagcttagcaacggaaataggactttgaccctgttcaacgtaacacggaatgacactgcctcctacaagtgcgagacccagaaccctgtttcagctcgcagaagtgatagcgtgattctaaacgtcctctacggcccagacgcccccacaatctctccgctgaatacctcctataggtcaggcgaaaaccttaatctgagctgtcacgcggcaagtaaccctcccgcccagtactcttggtttgtgaatgggacgttccaacagtccactcaggagttgtttataccaaacattacagtgaataacagcggatcgtatacctgccaagctcataattctgatactggtctcaaccggacaaccgtcacgaccatcacagtttacgccgaacctcccaaaccattcattacttccaataactcaaatcccgtggaggacgaagatgcagtagctctgacctgtgagcctgagatccagaacacaacttatttatggtgggtgaataaccagagtctgccagtcagcccgcgcctccagctttccaacgacaatcgaaccctgacattgctatctgtgaccagaaacgatgttggcccctacgaatgcgggatccaaaataagctgagcgtggaccactcagaccctgtcattctcaacgtgctgtatggaccagatgaccccactataagtccttcctacacgtactataggccaggcgtaaatcttagcctgtcttgtcacgccgcgtcaaaccccccggcccagtacagttggttgatcgatggtaatattcagcagcatacacaagagctctttatcagcaacataaccgaaaaaaattccgggctgtatacttgccaggcaaacaattctgcttcgggacacagccggaccacagttaagaccattactgtgtccgccgagttacctaaaccatcaatcagttctaacaatagcaagcccgtcgaagacaaggatgctgtggccttcacatgtgagcctgaggcacagaacacgacctacctgtggtgggtcaatggccagtccctacccgtgtcaccacgtctccaactgagcaacggcaaccgcactcttacattgtttaatgttaccagaaacgacgccagggcttatgtgtgcgggatccagaattctgtatccgcgaaccggagtgatcctgtcacactggacgtgctctacggacccgatactccaattatcagcccgcctgactcttcctatctgtcaggtgcaaatcttaacctgagttgtcatagcgcctcgaatccctccccacagtactcttggcgaattaacggcataccccagcaacacacccaggttttgttcatcgctaaaattacgcctaataacaatgggacctacgcctgcttcgtgagcaacctcgcaacaggacgcaataactcaatcgtcaagagtatcactgtgtccgcctctggcaccagcccaggtctgtccgctggggccacagtaggcattatgataggagtgttagttggcgtcgcactgatc

SEQ ID NO: 76609 - RNA, 2175 nt, synthetic construct
  misc_feature 1..2175: note = Q99661 KIF2C
  source 1..2175: mol_type = other RNA
atggccatggacagctccctgcaggctagactcttccccggccttgcaatcaagattcaaaggtctaacgggctgatacactcagccaatgtgcggaccgtcaacttggagaaaagttgcgttagcgtggaatgggcggagggaggtgctacaaagggcaaagaaatcgattttgacgatgtagccgcaattaatcctgagttactgcagctactcccactgcatccgaaggacaaccttcccctgcaggaaaatgtgactatccagaaacaaaagcgccgatccgtcaactctaagattcctgccccaaaagagtcgttgcgttcaagaagcacgaggatgagtaccgtgtccgagctccggatcacagctcaggaaaatgatatggaggttgaactgcccgcagccgctaactctcgcaagcagttcagcgtgcctccagcccccactagaccttcctgtccagcggtcgcagagataccgctgaggatggtgtcagaggaaatggaggaacaggtacacagtatccgggggagctcttccgccaatcccgttaactcagtgcgccgaaaaagctgcctcgtcaaggaggtggaaaaaatgaagaataagagagaggagaaaaaggctcaaaacagtgaaatgaggatgaaacgggcccaggagtacgactcttcctttcctaattgggaattcgcacgtatgattaaggagtttcgcgctaccttagaatgtcatccactgacaatgaccgatcccatcgaggagcacagaatttgcgtgtgtgtcaggaaacggcctcttaacaagcaggaattggccaaaaaggagatcgacgttataagcattccatcgaagtgcctgctactcgtgcatgaacccaaactgaaggtagatcttactaaatatctggagaatcaggcgttctgttttgacttcgcctttgatgaaacagcatctaacgaggtggtctaccgattcaccgctcgcccgttggtgcaaacgatctttgagggaggcaaggccacttgcttcgcttatggtcagaccgggtccggaaaaacacacactatgggcggcgacctctcagggaaggcccagaacgcaagtaagggaatttacgccatggctagcagagatgtttttctgttaaaaaatcaaccttgttataggaagctgggtctcgaagtgtacgtcaccttcttcgagatctataacggcaaactttttgacctgttgaataagaaagcgaagctacgggtgctggaagacgggaagcagcaggtacaggttgtgggactccaagagcacctggtcaactccgcagatgacgtgatcaaaatgattgatatgggctctgcctgccgcacaagcggtcagaccttcgctaattcaaacagttccagaagccatgcctgttttcagataatccttagggcaaaggggcgtatgcacggaaaattctctctggtcgacttggccggcaatgagcggggcgctgatacgtcaagtgccgaccgacagactagaatggaaggggcagagattaacaagagcctcctggcgttaaaagaatgcatcagggctctgggacaaaataaggcccatacaccctttcgcgagtccaagctaacccaggtgctccgggattctttcataggtgaaaactcgagaacttgcatgattgcaacaatcagcccaggcatctcctcatgtgagtacaccctgaatacgcttaggtacgccgaccgcgttaaagagttgagtcctcactctgggcccagcggagaacagctgattcagatggagaccgaagagatggaagcttgctccaacggcgccctcatcccaggtaatctgtcaaaggaggaggaagagcttagctctcaaatgtccagttttaacgaagcaatgacacagattcgagagctggaagagaaagctatggaggaattgaaggagataatccagcaggggcccgattggctcgaactgagcgagatgactgagcaacctgactatgatttagaaaccttcgtgaataaagccgagtctgcgctggcccagcaggctaagcacttttccgcactacgggacgtaattaaagccctccgtctggctatgcaacttgaagagcaggcctcaagacagatcagtagcaagaagaggccacag

SEQ ID NO: 76610 - RNA, 339 nt, synthetic construct
  misc_feature 1..339: note = Q5H943 KKLC1
  source 1..339: mol_type = other RNA
atgaacttctacctgctccttgccagctccatcctgtgcgctttgattgtgttttggaagtatagaaggttccagcggaataccggcgagatgtcttcaaacagtacagcattagccctggtccgccccagctcctctgggctaataaattcgaacactgacaataacctcgcggtttacgatctgtcacgagacatccttaataactttcctcacagcattgctcgtcaaaaaagaatcctggtgaatttgagtatggtagaaaacaagctcgtggagctggaacatacgctgctctccaaaggattcaggggtgcctctccacaccggaagagcacc

SEQ ID NO: 76611 - RNA, 303 nt, synthetic construct
  misc_feature 1..303: note = P01350 GAST
  source 1..303: mol_type = other RNA
atgcagagactgtgcgtgtacgtcctcatcttcgcccttgctctggcagcctttagcgaggcgtcctggaagcccaggtctcaacagcctgacgctccattgggcaccggggccaaccgggatttagaactgccgtggctagagcagcagggacccgcatcacaccatcgccgacaactcggtcctcagggcccaccccacctggttgccgaccctagtaaaaagcaggggccatggcttgaagaggaagaggaggcttatggatggatggatttcggccgtagaagcgcagaagacgagaat

SEQ ID NO: 76612 - RNA, 4068 nt, synthetic construct
  misc_feature 1..4068: note = P35968 VGFR2
  source 1..4068: mol_type = other RNA
atgcagagcaaggtgctgctcgccgtcgctctttggctgtgcgttgagaccagagcagcctccgtgggcttgccctctgtatcattagacctgcctaggctaagtatccaaaaagatattctcacaataaaggcgaacactacgctgcagatcacctgtcgggggcagcgcgaccttgattggctgtggccaaataaccagagcggatccgaacaacgagtggaggtcacagaatgctctgacggtttgttctgtaaaactctcaccattccgaaggtgatcggcaatgatacaggggcttacaaatgcttttatcgtgagaccgacctggcctcggttatttacgtgtatgtccaggattacagatcacccttcatcgcaagcgtgagtgaccagcacggagtagtttatataactgaaaacaagaataagacagtggtcatcccttgtctgggctccatttctaacctcaatgtgagcttatgcgccaggtacccagagaaacggtttgtgcccgatggtaaccgcatctcctgggactcaaagaaagggttcaccattcctagttatatgatcagctacgctggaatggtcttttgtgaggcaaagataaatgatgaatcttaccagtccattatgtatatcgttgtggtagtgggctacagaatttatgacgtcgtgctgtcaccaagccatggcatcgagcttagtgttggggaaaaattggtgctgaactgcacggccaggactgagctaaatgtcggaatcgatttcaactgggagtacccctcttccaagcaccaacataagaaactcgtgaatcgggacctgaagacccagagcggttcggaaatgaaaaagtttctttctacactgactattgacggcgtaacccgctccgatcaggggttgtatacatgtgctgcctcaagtggactcatgaccaaaaagaacagcacgttcgttcgagtgcacgagaaaccttttgtcgcgttcggctccggtatggaatctctggtggaggcaactgtcggggaaagagtgaggataccagccaagtacttaggatatccgccccctgagatcaagtggtacaaaaatggcattccactggagagcaaccatacaatcaaggctggccacgttctcaccataatggaagtgtcagagcgggacactgggaactacacagtaattcttaccaatcccatcagtaaagaaaagcagtcccacgtcgtgagcctggttgtgtatgtccctccacaaatcggagagaaatctttgatttcacccgtggatagttaccagtatggtacgacccagacactaacttgcaccgtatacgccatcccgcctccccatcacattcattggtattggcaactggaagaggagtgtgcaaacgaaccaagccaggctgtgtccgttacaaatccttacccctgcgaggaatggcgttctgtcgaggactttcagggcgggaacaagatagaagtgaataagaaccagttcgccctcatcgagggaaaaaataagactgtgtcgaccctggtcattcaagcggccaacgttagcgcactttataaatgcgaggctgtgaataaggtgggccgcggtgaaagagtaatctcctttcacgtcacaagggggccagagatcaccctgcagcccgatatgcagcctactgaacaggagtcagtgagtttgtggtgtacggccgaccggtctacattcgagaacctcacctggtacaaactgggcccacaaccgttacccattcacgttggagaactgcctactccagtgtgcaagaatctagataccctctggaagctgaacgctacaatgttcagcaattccaccaacgacatacttatcatggagttgaaaaatgcctcactgcaggatcagggcgactacgtctgtctcgcacaggatcgaaagactaaaaagcgccattgcgtggttagacaactgacagtgcttgaaagggtagcccccacgattaccgggaacctggagaaccagactacaagcatcggagaatctattgaggtctcctgtaccgctagtggtaatcctccaccccagatcatgtggtttaaagacaacgagacattggtggaagacagcggcatagtgctcaaggatgggaatcggaacctgactatccgcagagtcaggaaggaggacgaaggattatatacctgccaggcgtgttctgttctgggctgcgcaaaagtggaggccttctttattatcgaaggtgctcaagagaagacgaatctagagattatcatactcgtagggaccgccgtgattgcaatgttcttttggctgcttttggtcatcattctgcgtacagtgaaacgggccaacggcggagaactcaagactggctacctgtccatcgttatggatccggacgagttacctctggatgaacactgtgagcgacttccatatgacgcttcaaaatgggaattccccagagataggttgaagctcgggaaacctctgggacgcggtgcctttggccaggtgatagaggcagacgcgttcgggatcgataagaccgctacatgccggactgtcgccgtgaagatgctaaaagagggagcaacccatagtgaacacagagccctgatgagcgagctcaagattctgatccatattggccaccaccttaatgttgtgaacttgctgggtgcttgtacgaaacccgggggcccattaatggtcatcgtagaattttgcaagttcggaaatctctcgacatacctgaggtccaaacgcaacgagtttgtgccttataagaccaagggcgcccgattccggcaggggaaagactacgttggagcaatacccgtggatcttaagcgtagactggactctattactagctcacaaagttccgcttctagcggctttgtcgaggaaaaatccttgtcagatgtggaggaagaggaagccccagaggacctctataaggacttcctgacactagagcatctgatctgctacagcttccaggtagcgaaaggtatggaatttctcgccagtaggaagtgtatccaccgcgatctggctgcacggaatattcttttgtctgagaagaacgtggtcaaaatctgcgacttcgggctggccagagatatttacaaggacccggattatgttaggaaaggagacgctcgattacctctcaagtggatggcccccgaaaccatatttgatcgcgtgtacactatccagtccgacgtgtggagcttcggcgtcctgctttgggagattttttcgctgggtgcatcaccatatcccggcgtgaaaatcgatgaagagttctgtcggagactaaaggaggggaccaggatgcgtgcgcctgactacacaacgccagaaatgtatcagaccatgctcgattgctggcatggagagccctctcaacgccctacttttagtgaactggttgagcacttgggcaatctgttacaggccaacgctcagcaggacgggaaggattacattgtactcccgatctccgaaacactgagcatggaggaggactctggacttagcctgccaacctcccccgtgtcatgtatggaagaggaagaggtctgcgaccctaaattccactatgataatacagccggcataagtcaatacttgcagaacagcaagcggaaatctagaccagtgtccgttaagacttttgaggacatccccctcgaagagcctgaagtgaaagtcattccggatgacaaccagaccgattcaggtatggtgctggcaagtgaggaactaaagacgctggaggacaggacaaaacttagcccctccttcgggggaatggtaccatctaagtcgcgagagagcgtcgcttcagaaggctccaatcagaccagtggttaccaatctggctatcatagcgatgacactgataccacagtgtactcctcagaggaagccgagctcctgaagttgatcgaaattggggttcagactggatctaccgcacagatcctgcaacctgacagcggcacaacgttaagttcccccccagtg

SEQ ID NO: 76613 - RNA, 801 nt, synthetic construct
  misc_feature 1..801: note = P09237 MMP7
  source 1..801: mol_type = other RNA
atgagactgaccgtgctctgcgccgtctgtcttctgcccggcagcttggctttacctctgccacaggaggcagggggaatgtccgaactacaatgggagcaggcccaggactacctcaagaggttctatctgtacgattctgaaacaaaaaacgcgaattcacttgaggctaagctgaaagaaatgcagaagtttttcggtttgccgatcactggcatgctcaacagtcgggttattgagataatgcaaaaaccccgctgcggggtgcctgacgtagccgagtatagcctgtttccaaattcccccaagtggacgtctaaggtggtcacctaccgaatcgtgtcgtatacacgtgatctgcctcacattactgttgacagactcgtgtcaaaagcattaaacatgtggggaaaggaaatcccactgcatttcaggaaagtcgtgtggggcaccgccgatattatgatcggttttgctcggggggcacacggagacagctaccccttcgatggccctggcaatacacttgcccatgcttttgccccagggaccggattgggtggcgacgcgcacttcgatgaggacgaacgctggactgatgggagttccctgggaataaactttctatatgcagccacacatgagctcggccactctctgggtatggggcacagctccgacccgaatgctgtaatgtaccccacctacggaaacggcgatcctcagaatttcaagctttcacaggacgacatcaaaggcattcagaagctgtatgggaagagaagtaacagcaggaaaaag

SEQ ID NO: 76614 - RNA, 5460 nt, synthetic construct
  misc_feature 1..5460: note = Q96Q89 KI20B
  source 1..5460: mol_type = other RNA
atggagagcaacttcaatcaggaaggcgtgcccagaccttcctacgtcttttctgccgacccaatcgctaggccgtcagagattaacttcgatgggataaagctggacctcagtcacgaatttagccttgttgcacccaataccgaggccaactccttcgaatctaaagattatctgcaagtgtgcttgcggatccgcccttttacacagtcggagaaggagttagaatcagagggatgtgtacatattctggacagccagactgtggtcctaaaagaaccacagtgcatcctcggtcgactgagtgagaagtcctctggccaaatggcgcagaaattcagcttttccaaggtgttcgggcccgctacgacccagaaggagtttttccagggatgtattatgcaacctgttaaagatcttctgaagggccagtcacgtttgatctttacatacggtctcactaatagtgggaaaacctatacattccagggaaccgaagagaacataggcatcctgccaagaactctgaatgtgctctttgacagcttacaggaaaggctgtacacaaagatgaaccttaaaccccaccggtctcgcgagtatttgagactgtcctcagaacaagagaaggaggaaattgccagcaagagtgcactactcaggcagatcaaagaggtcaccgtgcataatgattctgacgatacgctgtacggctcccttactaacagcctgaatatttcggaattcgaggaatctatcaaggactatgagcaggccaacttgaatatggctaactccataaaattctcagtatgggttagttttttcgagatttacaatgaatacatctatgatctctttgtgcctgtcagctccaagttccaaaaacggaagatgctgcgcttatctcaggacgtgaaagggtacagctttattaaggatctgcagtggatccaggtgtcagacagtaaggaggcatatcgactccttaaactgggaatcaagcaccaatccgtcgccttcaccaaattgaacaacgctagctctagatcacatagtatttttacagttaagatactacagatcgaagacagcgagatgtccagggtgattcgggtatctgaactgtcgctctgcgatctggccggtagcgagcgtactatgaaaacccagaatgagggcgaacgccttagagagacagggaacatcaatacctccctgttgacgctcggaaagtgtataaacgtgctgaagaattcagaaaaaagtaagttccagcaacacgtcccatttagggagtctaaattaactcactacttccagagctttttcaacggcaagggtaaaatttgcatgatcgtgaatatctcccagtgttatctggcgtacgacgagacactaaacgttctcaagttttcagcaattgcccagaaggtgtgcgtcccggataccctgaatagctctcaagaaaaacttttcgggcccgtgaagtccagtcaggacgtaagcttggattctaactccaattcaaaaatcctgaacgttaagcgggctactattagttgggagaatagcctcgaagacctgatggaggatgaagaccttgtggaggagctggaaaacgccgaggaaacacagaatgtcgagaccaaattgctcgatgaagacctggataagacgttagaggagaacaaggcattcatatcgcatgaagagaaacgaaagctgctagacctcatcgaagacctgaaaaagaaacttattaacgagaagaaagaaaagttgaccctggagtttaagatccgcgaggaagtgacacaggagttcactcaatattgggctcagagagaagccgattttaaagagaccctcctgcaggagagggaaatcttagaggaaaatgcggagcggcgcctggccattttcaaggaccttgtcggaaaatgtgatacaagagaagaggcagctaaggacatatgcgccactaaagtggagaccgaagagacacacaactacgttggctttgaagatatcattgactccttgcaagataatgtggctgacatcaagaagcaggccgagattgcacatctctacatcgcctctctgcctgatccacaggaagctaccgcgtgtctagagctgaaattcaaccagataaaggcagagctcgccaaaactaagggcgaactgatcaaaacgaaggaggaacttaagaaaagggagaatgaaagcgactcattgattcaagagctggagacaagtaacaagaaaatcattacccagaatcagcgtatcaaggaattaataaacattatcgatcagaaagaggacactattaatgaatttcaaaacctcaagtcccacatggagaataccttcaagtgcaacgataaagctgacacatctagcctgatcataaataacaagcttatctgcaatgagaccgtagaagtccccaaagactccaagtcaaaaatttgtagcgagcggaagcgagtgaacgaaaacgagctgcagcaggatgaacctccagccaaaaaggggagtatccacgtttcttccgcaattactgaggaccagaagaaaagcgaggaagtgagacccaatatcgccgagatagaagatattagggtcttgcaagagaacaatgaaggactccgcgcttttctgctaacaatcgagaacgagctgaagaatgaaaaagaggaaaaggccgagctcaacaaacagatcgtgcatttccagcaagaactgtcgctttcagagaagaagaatttgacgctgtctaaagaggtacagcagattcagagtaactatgacatcgcaattgcggaattacacgtgcaaaagtccaaaaatcaggagcaggaagagaagataatgaaactcagcaacgagatcgaaaccgctactcggtctattacaaataacgttagccagatcaagctgatgcataccaagattgatgagcttagaacactggactccgtctcacaaatcagtaatatagatctactcaacctgagggacttgagcaatggttctgaagaggataacctgccgaacactcagttagacctcctgggcaatgattaccttgtgtccaaacaggtgaaggaatatcgcatccaggagcctaaccgagagaattcatttcacagtagcattgaagccatctgggaggaatgcaaagagattgtcaaggcatcctctaaaaagtcgcatcaaatcgaagagctggagcagcagatagaaaagttgcaggccgaggttaaagggtacaaggacgaaaacaatcggctcaaagagaaggaacacaaaaaccaagatgacctgctaaaggagaaggagaccctgattcagcagcttaaagaagagctccaagaaaagaatgtgacgctggacgtgcagatccagcacgtagtcgagggaaaacgtgctttgagcgagctgacccagggcgtgacatgttataaggccaaaatcaaggaattagagactattctcgaaacccaaaaagttgagtgctcacattccgcaaagctggaacaggatatacttgagaaggagagtatcattctgaaattggaaagaaacctcaaggagttccaggaacacctgcaggactctgtgaaaaatacaaaggatctaaacgtcaaagagctgaagcttaaggaagagatcactcaactcaccaataacctgcaggacatgaaacatttgttacagctgaaggaggaagaggaagagacgaataggcaggaaacagagaaactcaaggaggaactgagcgcttcctcagcccgcacccaaaaccttaaagcggatctgcagcggaaggaggaagactacgccgatttgaaggagaaactaactgacgctaagaaacagattaagcaagtgcagaaagaggtttctgtgatgagagatgaagacaagctgctcaggatcaagataaatgagctggaaaaaaagaaaaaccagtgtagccaggagcttgatatgaagcaacgaacaatccagcagttaaaagaacagctgaataaccaaaaggtagaggaggcaattcagcagtatgaacgcgcctgcaaagacctcaacgtcaaggagaagatcattgaagacatgcggatgaccttggaggaacaggagcaaactcaggtggagcaggatcaggtgctggaagctaaactcgaggaagtcgagagactggccaccgaacttgagaagtggaaagagaagtgtaatgacctggaaacaaaaaacaatcaaaggagtaacaaggagcacgaaaataacacggatgttttgggtaagctaaccaatctgcaggacgagctccaggagtccgaacaaaaatacaacgcagatcgtaagaaatggttagaggaaaagatgatgctgatcactcaggcgaaagaggccgaaaatatacgcaacaaggagatgaagaaatacgctgaggaccgggaaagatttttcaagcagcagaatgagatggaaattcttacagcccaactgaccgagaaagatagcgacctccagaagtggagggaagagcgagatcagttggtggcagctctggagatccagctcaaagccctgatctcttcaaacgtacaaaaggacaatgaaattgagcagcttaagcggatcatatccgaaacaagtaaaattgagactcagatcatggatattaagcccaaacgcatcagctcggcagacccagataagctacagaccgaacctctgtctacgtccttcgagataagcagaaacaaaattgaggacgggtcagtggtcttggacagttgcgaagtgtctacagagaatgatcaatccaccaggtttcccaagccagaattagagatccagttcactcccctgcagcctaacaaaatggccgttaagcacccaggctgtaccacaccggtgactgtcaagatccccaaagctcggaagcgaaaaagcaacgagatggaagaggacctcgtgaagtgcgaaaataaaaagaacgcgacccctagaacaaatctgaagtttccaatttcagatgaccgcaacagtagcgttaaaaaggagcaaaaagtggccatcaggccctcctctaagaaaacgtatagccttcgttcccaggcatcaattataggagtcaatctggctaccaagaagaaagaaggcactctccagaagttcggggattttttgcagcattctcctagtatcctgcaatcgaaagccaagaaaattatcgagacaatgagctcctctaagctatcaaacgtagaggccagcaaggaaaatgtgtcccagccaaaacgggctaagagaaaactgtacaccagtgagatctctagccccattgacatatcaggacaggttatcctcatggatcagaagatgaaagaatccgaccaccaaattatcaagaggcgccttcgaactaagacagcaaaa

SEQ ID NO: 76615 - RNA, 951 nt, synthetic construct
  misc_feature 1..951: note = P43358 MAGA4
  source 1..951: mol_type = other RNA
atgagctccgagcagaagtctcaacactgcaaacccgaagagggcgtggaagcccaggaggaagctctggggctcgtcggagcacaggcccctaccacagaggagcaggaagcggctgtttcaagtagctccccacttgtgccgggtactctggaggaagtacccgccgcagagtctgccggccctccacaatcgccccagggggcttcagcattgcctacgaccatcagcttcacatgttggagacagccaaacgagggaagttcctctcaggaagaggaaggccccagcacttcccctgacgccgagtcattatttagggaagctctgagtaataaggtggatgagctagcccatttcctcctgcggaaataccgcgcgaaggagcttgtcaccaaagcagaaatgctggagcgagtgattaagaactataagcgttgctttccagttatattcggtaaagccagcgaatctttgaagatgatctttgggattgacgtgaaagaggtcgatccggcttccaatacatacaccctcgtgacttgtctgggactgtcatatgacggcctcttaggcaacaatcaaatcttccccaagacagggctgcttattatcgtattgggaaccatagccatggaaggtgatagcgcaagtgaggaggaaatctgggaggaactgggcgttatgggggtgtacgacggaagagagcacacggtctatggcgaacctaggaaactactcactcaggattgggtgcaggagaactacctggagtatcggcaggtgccaggttctaatcccgctcgctacgaatttctttgggggcctagagccctggcggagacctcctacgtcaaggttttggaacatgtggtaagggtgaacgcccgggtccgcattgcatatccaagcctccgagaggctgccctgttagaggaagaggaaggagtg

SEQ ID NO: 76616 - RNA, 927 nt, synthetic construct
  misc_feature 1..927: note = P43355 MAGA1
  source 1..927: mol_type = other RNA
atgagcctggagcagagatccctccactgcaagcccgaagaggcccttgaagctcaacaggaggcactgggcttggtgtgtgtccaggccgcgacctcttcaagtagccctttagttctggggacactagaagaggtgccaactgctggatccacggacccgccccagtctcctcaaggtgcctcggcattcccaaccacaatcaactttactaggcagcggcagccctcagagggcagcagttcccgcgaagaggaagggccttctaccagctgcattctcgagtccctgttccgagccgtaataacaaaaaaggtggctgatcttgtcggatttctgttgctcaaataccgtgcaagagagccagtgaccaaggccgaaatgctggagtcagttatcaaaaattataagcattgtttccccgaaatttttggcaaggctagtgagagcctgcagctcgtgttcggtatcgacgtcaaagaagccgatcctactgggcactcttacgtgttagtaacatgcctgggactttcctatgacggcttgctgggcgataaccaaattatgccaaagaccgggtttctaatcatagttctcgtgatgatcgcgatggagggaggtcatgcaccggaggaagagatttgggaagagctgtcagtcatggaagtgtacgacggcagggagcacagcgcctatggggagccccggaaacttctgacgcaggatttggtgcaggaaaagtacctcgagtatcgccaggtccctgacagtgatccagctagatacgaattcctgtggggacccagggccttagcagagacttcttacgttaaagtgctggaatatgtaatcaaggtgtccgctcgggtccgctttttctttcctagcctccgagaggccgcgcttagagaggaagaggaaggcgtg

SEQ ID NO: 76617 - RNA, 3426 nt, synthetic construct
  misc_feature 1..3426: note = O60732 MAGC1
  source 1..3426: mol_type = other RNA
atgggcgacaaggatatgcccaccgccgggatgcctagcctgctccagtcctcttcagagagtccacaaagctgcccggaaggagaggactcccagtctccccttcagatccctcagtcgtcaccagaaagcgatgacacactgtaccccttgcaaagtcctcagtccagatctgagggtgaagatagctccgacccattacagaggccccctgagggcaaagattcacagagtccactgcaaattccgcagagctctcccgagggggacgatactcagtcccctctacagaactcacaaagcagtccagaaggaaaggactctctctcccccctggagataagccagtcgcctccagaaggcgaggatgtgcagtctccccttcaaaatccggcttcctcattctttagtagcgcactgttgtccatcttccagtctagccctgagtcaacgcagagtccctttgaaggtttcccacagtccgtcctccaaattcctgttagcgccgcgtcttcaagtaccctggtgagcatctttcagtcctctcccgagtcgacacagagcccattcgaagggtttccccagtcccctctgcaaattccagtatcacggagtttctctagcactctcttatccatctttcagtcaagcccggagcgcacccagtctacattcgaaggatttgctcagtcccccctgcaaatacctgtgagtccaagctcttcctcaacccttttgagtctgttccagagcttttcggagcgaactcagtccacattcgagggcttcgcccagtctagcctacaaatccccgtctcacctagtttttcctctaccctcgtgagcctgttccagtcctcaccagaacgtacgcagagcacttttgagggcttcccccaaagtccgcttcagattcctgtttcttccagctcgtcatctaccctgttgagtctctttcagtccagcccagaaagaacacactctactttcgaggggtttccccagagcctgttacaaatccctatgacctcctcattcagtagcacactgctctctatttttcagtcctcacccgaaagtgcacagagcaccttcgagggatttccacagtcccctcttcaaatccccggttctccatcgttcagctcaacgctgttgtccctatttcagagttctccggagaggactcatagcacattcgaaggcttccctcagtcccccctgcagataccaatgacctcatcttttagcagtactctcctgtccattcttcaaagctctcccgagtcagcccagtccgctttcgaagggtttcctcagagtccactgcaaatccccgtgagctcgtctttctcctatacattgctcagcctgtttcagtcaagtcctgagcggacccactctacgttcgaaggatttccgcagtccccattacagattcccgtcagctcaagtagctcctctagcaccctgctatccctcttccaatcatctcctgagtgtacacagagtacttttgagggcttcccacagtcgcccctgcagatccctcaaagcccgcccgaaggtgagaacacccattccccacttcagatcgtgccttctttgcccgaatgggaggactcactgagcccacactactttcctcagtcccccccacagggggaggatagtctctctccgcattatttccctcaaagccccccacagggagaagactcactgtccccccactactttcctcagagtccacagggcgaggacagcctttctccccactatttccctcaatccccgccacagggcgaagattcaatgagccccctgtacttccctcagtcgcccttgcaaggggaggaatttcagtctagtctccagtccccagtaagcatttgctcatcctctacacctagcagtctgccccagtccttcccagagagctctcaatcacctccggagggacccgttcagagtccattacattcccctcagagccccccagaaggtatgcactctcagtcgcctctgcaatcacccgagagcgcaccggaaggcgaggactccctaagtccactccagatacctcagtctcccctggaaggggaggatagcctttcctcattgcattttccacagagtccccctgagtgggaagactctctgagcccgctccacttcccccaatttccacctcagggagaggatttccagtcctcactgcaaagccccgtgtctatctgttccagtagcacttcgttatccctgcctcagtcttttccagaatcaccccagagccctccagagggccccgcccagagtccgcttcaacgccctgtctcctctttctttagctataccttggcttcactcctgcagtccagtcacgaaagcccacagtctccccctgagggtccagcccagtcacccctacaatccccggtgagctctttccctagttcgacatccagctcactgtctcagagctcccccgtgagttcatttccatctagcacctccagtagcctctccaaatcttcacctgagagccccctgcagtcgccagtcatttccttcagttctagcacttcactttcccccttctctgaagagagtagctcccctgttgacgaatacacgtcaagctctgatacattgctggagagtgactccttaaccgatagcgagtcactcatcgaatctgagccactgtttacttacacccttgacgaaaaggtggatgagctggcgagattcttgctcctgaaatatcaggtaaagcaaccgataacaaaggcagaaatgctaaccaatgtgatttccaggtacactgggtattttcccgtcatcttccggaaagcccgcgagtttatcgagattctgttcggcatctcgctccgagaagtggaccctgacgatagctacgtttttgtgaacacactggaccttacgagtgagggatgcttgtctgatgaacagggcatgtcccagaatagactgttaattctcatactgagcatcattttcatcaaggggacctatgcttcagaggaagtcatctgggacgtgcttagtggaattggtgtaagggccggccgggagcattttgcattcggggagccacgtgaactgctaactaaagtttgggtgcaggagcactacctcgaatatcgcgaggtccccaactccagccctccaagatacgaatttctgtggggacccagggctcattctgaggtgataaagcggaaagtcgtggagttcttggccatgctgaagaatacagttcctatcacctttccgtcaagctacaaggatgcgttaaaagacgtggaagagcgagcccaagcaattatcgatacaactgacgattccaccgctacggaatctgccagttcgagcgtaatgtccccatcattctctagcgag

SEQ ID NO: 76618 - RNA, 1527 nt, synthetic construct
  misc_feature 1..1527: note = P78395 PRAME
  source 1..1527: mol_type = other RNA
atggagagaaggcggctgtggggcagcatccagtcccgctacatttctatgtcagtgtggaccagtccccgacgtctcgtcgaacttgccgggcaaagcctgttgaaggacgaggctttagcaatagccgcgctggaactactccctagagagctgttcccaccgctttttatggctgccttcgatggaaggcactcccagacactgaaagcaatggttcaggcctggccctttacttgcttgcctctcggtgtgctgatgaagggccagcatctgcacctcgaaacgttcaaagctgtattagacgggctggatgtgcttttggcacaagaggtccggccacgcagatggaagctgcaggtgctagacctcaggaaaaactctcatcaggatttttggaccgtttggtcgggaaatcgggcctcactgtatagcttccccgagcctgaagctgcccagccaatgacaaagaagcgcaaagtggacggccttagtactgaggcggaacaaccctttatccctgtcgaggtgctggtagatttgttcctcaaggagggtgcatgtgacgaactgttttcctacttaattgagaaagttaagcgaaaaaagaacgtgctgagactctgctgtaagaaacttaagatcttcgccatgccaatgcaggatattaaaatgatcctgaagatggtccagttggactctatagaagatctagaggtgacctgcacatggaaactgccgaccctcgctaagtttagcccctatctggggcagatgatcaatcttaggcggctgttgctctcccacattcatgcctcaagttacatcagccctgaaaaagaggagcaatatattgcacagttcacttctcagtttctgtccttacaatgtctgcaggctctatacgtggactcactcttcttcctgcgtggacgccttgatcagttgctgagacacgtcatgaacccactcgaaacactgagcatcaccaattgcaggcttagtgagggcgacgttatgcacctgtctcagtcccccagcgtgtcgcaattgtctgtactctccctgtcaggcgtgatgttaacggacgtcagtcctgaaccactgcaggccctactcgagcgggcgagcgccactctgcaggatcttgtgtttgacgaatgtgggataaccgatgaccagttgctggcactcctgccctccttatctcattgcagccaactgacaactctttcattctatggaaacagtatttccatcagcgctttgcagtctctcctgcagcacctaattggtctgtcaaatctcacccatgttctgtacccggtgcctcttgagagttacgaggatatccacggcacattgcacctggaacgattagcctatctccatgctcgcctgagagagcttctgtgtgaattggggaggcccagcatggtctggctctccgccaacccatgccctcactgtggagaccggaccttttacgatcccgagccaatcctgtgcccctgcttcatgcctaat

SEQ ID NO: 76619 - RNA, 426 nt, synthetic construct
  misc_feature 1..426: note = O15392 BIRC5
  source 1..426: mol_type = other RNA
atgggcgcccccaccctgcctccagcttggcagccgttcctcaaggaccacagaatcagcacatttaaaaactggcccttccttgaggggtgcgcatgtactcctgaaaggatggccgaggcgggatttattcattgcccaacggaaaatgagcccgatctggctcaatgtttcttttgcttcaaggaattggagggttgggagcctgacgatgacccaatagaagagcacaaaaagcattcctctggctgtgcctttttatcagtgaaaaagcagttcgaagagctgaccctaggggagtttctcaagctggatcgggaacgcgcaaaaaacaagatcgccaaagagacaaataacaagaaaaaggaattcgaggaaactgctaagaaagtccgacgtgcaattgagcagcttgccgctatggac

SEQ ID NO: 76620 - RNA, 945 nt, synthetic construct
  misc_feature 1..945: note = P43362 MAGA9
  source 1..945: mol_type = other RNA
atgagcctggagcagagatccccccactgcaagcctgacgaagatctcgaggcccaaggcgaagaccttgggctgatgggagctcaggagccaaccggtgaagaggaggaaacaacttcttcaagtgatagcaaagaggaagaggtgtccgcagccggctcttcgtcaccgccccagagccctcaggggggagcgagttcctctatcagcgtctactatacgttgtggtcccaattcgacgagggctcaagtagccaggaagaggaagagccatcttcctcagttgatcccgctcagttagaatttatgttccaggaggccctgaagctaaaagtggcagagctcgtacattttctgcttcacaagtacagggtgaaagaacctgtcaccaaggccgagatgctggaaagcgtgattaagaactataaacggtacttcccagttatatttggtaaggctagtgagttcatgcaagtgatctttgggacagacgtcaaagaagtggatcccgcaggacattcttatattttggtaactgccctcggcctgtcctgtgacagcatgctgggcgatgggcactcgatgcctaaggctgccctcttaatcattgttctgggagtgatccttaccaaagacaattgcgcgccagaggaggtcatatgggaagcattgtctgtgatgggtgtgtacgtcggcaaggagcatatgttctatggggaaccgcgcaagctgctaacacaggattgggttcaggagaactacctcgaataccgacaggtgcccggatccgaccctgcccactatgagtttctgtggggctcaaaagctcacgccgagaccagttacgaaaaggtaatcaattatcttgtgatgctgaacgcacgtgagccaatttgttaccccagcttgtatgaagaggtcctcggtgaggaacaagagggggtg

SEQ ID NO: 76621 - RNA, 1119 nt, synthetic construct
  misc_feature 1..1119: note = Q9UBF1 MAGC2
  source 1..1119: mol_type = other RNA
atgccccctgtgccaggcgtcccgttcagaaacgttgacaatgatagccccacctccgtggagctggaagactgggtagatgcccagcaccctacagacgaggaagaggaagaggcttcttcagcaagtagcactctctaccttgtgttttccccatcttcgttctcaacgagcagttccctgatcttggggggacccgaggaagaggaagtcccttctggtgtgattccaaacttaaccgagagcataccctcctcacctccacaaggcccgccccaggggcctagtcagagcccactgtcttcctgctgttcaagctttagttggtcttccttcagcgaggaatcgtcttcccagaagggagaggatacaggcacttgccaaggtctacccgactcagaaagtagctttacctatacactcgatgagaaagttgccgaactggtggagttccttctgttgaagtacgaggcggaagagcctgtcaccgaagctgagatgctcatgatcgtgattaaatataaggactactttccagtaatcctgaaaagggcccgggaattcatggagctgctctttgggttagcactgattgaggttggacccgatcatttctgtgtgtttgccaatactgtcggccttacagacgaaggctccgatgacgaggggatgccggaaaactctttgctgatcataatcctaagcgtgattttcatcaagggaaattgcgcttcagaggaagtgatttgggaggtcctcaacgcagttggtgtgtatgccggccgcgagcactttgtatacggggaacctcgagagctgcttaccaaggtgtgggtccagggacattatctggaataccgtgaggtgccccacagttccccaccttactatgagttcttgtggggccccagagctcatagcgaatctatcaaaaagaaagttctcgagttcctggccaagttaaataacacggtgccatcaagttttcccagctggtacaaagatgcgctgaaggacgtcgaagagagggtgcaggcaactatagacaccgccgatgacgctacagtaatggcctccgaatctctctcggttatgagctccaatgtgtcattcagtgag

SEQ ID NO: 76622 - RNA, 2463 nt, synthetic construct
  misc_feature 1..2463: note = P21802 FGFR2
  source 1..2463: mol_type = other RNA
atggtgagctggggcagattcatctgcctggtcgttgtgaccatggccacactctcccttgctaggccctctttttcactggtagaggacactacgttggaacctgaggaaccaccgaccaagtaccagattagtcaacccgaggtgtatgtcgcagcccctggggaaagcttagaggtgcggtgtctgctaaaagatgcggctgttatatcctggacaaaggacggagtgcacctcggtccaaacaatcgcactgtcctgatcggcgagtaccttcagattaaaggggccaccccccgagattctggactgtatgcatgcacagcctcgcgtaccgtggactcagaaacttggtacttcatggtaaacgttacagatgctatcagcagtggcgacgatgaggacgataccgacggtgcagaagattttgtgtccgagaattctaacaataagagagccccttattggacgaacactgagaaaatggaaaagaggttgcatgctgtcccagccgcgaataccgtgaagttccggtgtcccgcagggggaaaccctatgccaacaatgcgctggctcaaaaatggcaaggagtttaaacaggaacacagaattggcgggtacaaggtgaggaaccagcattggagcctgatcatggagtccgtcgttccgtcagacaaaggaaattatacttgcgtggtagaaaacgagtacggtagtataaatcacacctaccatctggatgtggtcgagcggagcccccaccgccctatcctccaagccggcttaccagctaacgcctctacagtggttgggggagacgtggaattcgtctgtaaggtgtattccgacgcacagccccacattcagtggatcaagcatgtagagaaaaatggctcaaagtacggtcctgatgggctgccatatcttaaagttttgaaggctgccggagtgaacaccacggacaaagaaattgaggtcctgtacatccgaaacgtgacttttgaagatgcgggcgagtatacatgcctagccggcaatagcatagggattagtttccactctgcatggctcaccgtcctgcccgctccgggaagagagaaggaaatcactgcctcccctgactaccttgagattgctatctattgtatcggtgtgtttctgattgcctgcatggttgtgacagtaatattgtgtaggatgaaaaacaccacgaagaagcccgatttcagctcgcagccagcagtccataaactcaccaagcggatccctctgcgtcgccaagtgacagtttctgccgaatcctcaagtagcatgaattccaacactcccttagtgagaattaccacaaggctgtctagcactgctgacaccccaatgctcgcgggcgtctcagagtacgaacttcccgaggatcctaaatgggagtttccacgggacaagctgacattggggaaaccgctaggagaaggctgcttcggtcaggtggtaatggcagaggccgtggggatcgataaggacaagcccaaagaagctgttaccgtcgccgtgaagatgctgaaagatgacgcaactgagaaggacctcagtgatctggtgtccgagatggaaatgatgaaaatgataggcaagcacaagaatattatcaaccttctgggagcctgtacgcaggacggccctttgtacgtcatcgttgagtatgctagcaaagggaatctccgagaatacctgcgcgccagaaggccacccggaatggagtattcttacgatattaaccgggtgcctgaagagcagatgacatttaaggacttagtgtcatgcacctatcaactggcacgcggtatggagtacctagcgagtcagaaatgcatccacagagatctcgctgccaggaatgtactggtcactgaaaacaatgtgatgaagattgcagacttcggccttgcccgtgatataaacaatatcgactattacaaaaagaccacaaacgggcggttgccagttaagtggatggctcccgaggccctgttcgatcgagtgtacacccatcagagcgacgtctggtcctttggagtgctcatgtgggaaattttcactctgggcggttctccgtatcctgggatcccagttgaggaactttttaaactgttgaaggagggccacagaatggataaacccgcaaattgtacaaacgagctctacatgatgatgagggactgctggcatgctgtgccttcgcaacgccccacgttcaagcagctggtagaagatttagaccggatcctgaccctaactacaaacgaggaatatctcgacctgagccagccacttgagcagtactccccttcatatcccgataccagaagttcttgtagctccggagacgattcagtctttagcccagacccgatgccttacgaaccctgcttgccacaatatccccacattaatggctctgtgaaaaca

SEQ ID NO: 76623 - RNA, 783 nt, synthetic construct
  misc_feature 1..783: note = P07288 KLK3
  source 1..783: mol_type = other RNA
atgtgggtgcccgtcgttttcctgaccctcagcgtgacatggatcggcgccgctcctcttattctgtccagaatagtagggggatgggagtgcgaaaagcactctcagccatggcaagtgttggtcgcatcaaggggtcgggccgtgtgtggcggggttttagtgcatccgcagtgggtcctgactgcggctcactgcatccgcaacaaaagtgtgattctactcggacgacatagcctgtttcaccccgaggacacgggccaggtattccaggtttcccattcttttcctcacccactttacgatatgtcgctgttgaagaatcgtttcctcagacccggtgacgattcaagccacgacctgatgctgctcaggttaagtgaacctgccgagctgaccgatgcagtgaaagtcatggaccttccaacacaagaacccgccttggggactacctgttatgcttccggatggggctctatcgagcctgaggaatttctgacaccaaagaaactacagtgcgtggatctccatgtgattagcaacgacgtctgtgcacaggttcacccgcagaaggtgaccaagttcatgctgtgcgccggccggtggactgggggaaaatccacatgttcaggtgatagtggcgggccccttgtatgcaatggagtgctgcaaggcatcaccagctggggttctgagccttgtgctttgccagaacgcccctccctctacacgaaggtcgtgcattatagaaaatggataaaggacactatcgttgccaaccct

SEQ ID NO: 76624 - RNA, 2250 nt, synthetic construct
  misc_feature 1..2250: note = Q04609 FOLH1
  source 1..2250: mol_type = other RNA
atgtggaacctgctccacgagaccgacagcgccgtggctacagcaagaaggccccggtggctttgcgccggcgcgctggtcttggctgggggattctttttactgggtttcctatttggctggttcatcaagtcctctaatgaagccactaacattacgcctaaacataatatgaaggcatttctcgatgagctgaaagccgaaaacataaagaaattcctttacaattttacccagatcccacacctggctgggacagagcaaaacttccagttggcaaagcagattcagtcacaatggaaggaatttggactcgacagtgttgagctggcccattatgatgtgctgctcagctacccgaataaaactcaccccaactatatctccattatcaatgaggacggcaacgaaatattcaatacctctttatttgagcctccaccccctggttacgaaaacgtatcggatatcgtgccacccttctcagcttttagccctcaggggatgccagagggagacctggtctatgtgaattacgcccgcacagaggatttcttcaagcttgaacgagacatgaaaattaactgtagtggcaagatcgttattgcgcgttatggcaaagtgtttagagggaataaggtcaagaacgcacagttggccggagctaaaggtgtgatcctgtactccgatccggccgactacttcgcacccggcgtaaagtcttatcctgatgggtggaacctaccaggaggcggtgttcagagggggaatatactcaacctgaatggagctggcgacccccttacccctggctacccagccaacgagtatgcgtaccggcgcgggattgccgaagcagtgggactgcccagcatcccggtccatcctattggttattacgatgctcaaaaattgctcgagaagatgggcgggtccgcccccccagactcaagttggagaggaagcctgaaagtgccttataatgtgggccccggttttactgggaacttctctacacagaaggtcaaaatgcacatccactccaccaatgaagttacgaggatctacaacgtgattggcactttacggggagctgtagagccagaccgctacgtgatactgggcgggcatcgagattcatgggtctttggaggtatcgacccccagagcggcgccgcagtggttcacgagattgtgagaagtttcgggaccctcaagaaggaaggatggaggcctcggcgtacaatcctttttgcctcttgggatgctgaggaattcggcctgttgggttccactgagtgggcggaagagaatagccgcctactgcaggagagaggggtcgcatatataaacgccgactcgtctattgaaggcaattacaccctcagggtggattgcacaccactgatgtattcccttgtacataacctgaccaaagagttgaagtcaccggacgaaggatttgagggcaaaagtctctacgaaagctggacgaagaaatccccctctcctgagttcagcgggatgccacggatctcaaagctgggaagtggtaatgattttgaggttttctttcaacgattaggcatcgcttccgggcgcgccagatatactaagaactgggaaacaaataaattcagcggataccccctgtatcactctgtgtacgagacctacgaactagtcgagaagttctatgaccctatgtttaaataccacctcactgtggcacaggtcaggggcggtatggtgttcgagctggccaactcaattgttcttccatttgattgtcgggactatgctgtggtattgcgcaagtacgccgataaaatctatagtattagcatgaagcatccccaggaaatgaagacatactccgtctctttcgactcgctgtttagcgcagtgaaaaacttcaccgagatagcgtccaagttttcagaaagactccaagacttcgataaaagtaatccgatcgttctgaggatgatgaacgaccagcttatgtttctggagcgtgctttcattgatcctttggggctcccagaccggcccttttatcgacacgtgatctacgccccttctagccataataagtacgcaggcgaatccttccccggaatctatgatgccctgtttgacattgagtcaaaagtcgatccaagcaaggcttggggcgaggtgaagagacagatatacgtagccgcattcacggtgcaggctgccgcggaaaccttatctgaggttgcc

SEQ ID NO: 76625 - protein, 34 aa, synthetic construct
  REGION 1..34: note = A0A5B9_145-178
TILYEILLGKATLYAVLVSALVLMAMVKRKDSRG

SEQ ID NO: 76626 - protein, 24 aa, synthetic construct
  REGION 1..24: note = B7Z8K6_131-154
LGLRMLFAKTVAVNFLLTAKLFFL

SEQ ID NO: 76627 - protein, 208 aa, synthetic construct
  REGION 1..208: note = O00206_632-839
TIIGVSVLSVLVVSVVAVLVYKFYFHLMLLAGCIKYGRGENIYDAFVIYSSQDEDWVRNELVKNLEEGVPPFQLCLHYRDFIPGVAIAANIIHEGFHKSRKVIVVVSQHFIQSRWCIFEYEIAQTWQFLSSRAGIIFIVLQKVEKTLLRQQVELYRLLSRNTYLEWEDSVLGRHIFWRRLRKALLDGKSWNPEGTVGTGCNWQEATSI

SEQ ID NO: 76628 - protein, 62 aa, synthetic construct
  REGION 1..62: note = P01730_397-458
MALIVLGGVAGLLLFIGLGIFFCVRCRHRRRQAERMSQIKRLLSEKKTCQCPHRFQKTCSPI

SEQ ID NO: 76629 - protein, 27 aa, synthetic construct
  REGION 1..27: note = P01850_152-178
ILLGKATLYAVLVSALVLMAMVKRKDF

SEQ ID NO: 76630 - protein, 81 aa, synthetic construct
  REGION 1..81: note = P07766_127-207
VMSVATIVIVDICITGGLLLLVYYWSKNRKAKAKPVTRGAGAGGRQRGQNKERPPPVPNPDYEPIRKGQRDLYSGLNQRRI

SEQ ID NO: 76631 - protein, 729 aa, synthetic construct
  REGION 1..729: note = P08575_576-1304
ALIAFLAFLIIVTSIALLVVLYKIYDLHKKRSCNLDEQQELVERDDEKQLMNVEPIHADILLETYKRKIADEGRLFLAEFQSIPRVFSKFPIKEARKPFNQNKNRYVDILPYDYNRVELSEINGDAGSNYINASYIDGFKEPRKYIAAQGPRDETVDDFWRMIWEQKATVIVMVTRCEEGNRNKCAEYWPSMEEGTRAFGDVVVKINQHKRCPDYIIQKLNIVNKKEKATGREVTHIQFTSWPDHGVPEDPHLLLKLRRRVNAFSNFFSGPIVVHCSAGVGRTGTYIGIDAMLEGLEAENKVDVYGYVVKLRRQRCLMVQVEAQYILIHQALVEYNQFGETEVNLSELHPYLHNMKKRDPPSEPSPLEAEFQRLPSYRSWRTQHIGNQEENKSKNRNSNVIPYDYNRVPLKHELEMSKESEHDSDESSDDDSDSEEPSKYINASFIMSYWKPEVMIAAQGPLKETIGDFWQMIFQRKVKVIVMLTELKHGDQEICAQYWGEGKQTYGDIEVDLKDTDKSSTYTLRVFELRHSKRKDSRTVYQYQYTNWSVEQLPAEPKELISMIQVVKQKLPQKNSSEGNKHHKSTPLLIHCRDGSQQTGIFCALLNLLESAETEEVVDIFQVVKALRKARPGMVSTFEQYQFLYDVIASTYPAQNGQVKKNNHQEDKIEFDNEVDKVKQDANCVNPLGAPEKLPEAKEQAEGSEPTSGTEGPEHSVNGPASPALNQGS

SEQ ID NO: 76632 - protein, 46 aa, synthetic construct
  REGION 1..46: note = P08637_209-254
VSFCLVMVLLFAVDTGLYFSVKTNIRSSTRDWKDHKFKWRKDPQDK

SEQ ID NO: 76633 - protein, 68 aa, synthetic construct
  REGION 1..68: note = P10747_153-179
FWVLVVVGGVLACYSLLVTVAFIIFWVRSKRSRLLHSDYMNMTPRRPGPTRKHYQPYAPPRDFAAYRS

SEQ ID NO: 76634 - protein, 83 aa, synthetic construct
  REGION 1..83: note = P11912_144-226
IITAEGIILLFCAVVPGTLLLFRKRWQNEKLGLDAGDEYEDENLYEGLNLDDCSMYEDISRGLQGTYQDVGSLNIGDVQLEKP

SEQ ID NO: 76635 - protein, 265 aa, synthetic construct
  REGION 1..265: note = P15391_292-556
VSAVTLAYLIFCLCSLVGILHLQRALVLRRKRKRMTDPTRRFFKVTPPPGSGPQNQYGNVLSLPTPTSGLGRAQRWAAGLGGTAPSYGNPSSDVQADGALGSRSPPGVGPEEEEGEGYEEPDSEEDSEFYENDSNLGQDQLSQDGSGYENPEDEPLGPEDEDSFSNAESYENEDEELTQPVARTMDFLSPHGSAWDPSREATSLGSQSYEDMRGILYAAPQLRSIRGQPGPNHEEDADSYENMDNPDGPDPAWGGGGRMGTWSTR

SEQ ID NO: 76636 - protein, 62 aa, synthetic construct
  REGION 1..62: note = P16410_162-223
FLLWILAAVSSGLFFYSFLLTAVSLSKMLKKRSPLTTGVYVKMPPTEPECEKQFQPYFIPIN

SEQ ID NO: 76637 - protein, 72 aa, synthetic construct
  REGION 1..72: note = P26718_1-72
MGWIRGRRSRHSWEMSEFHNYNLDLKKSDFSTRWQKQRCPVVKSKCRENASPFFFCCFIAVAMGIRFIIMVA

SEQ ID NO: 76638 - protein, 63 aa, synthetic construct
  REGION 1..63: note = P30273_24-86
LCYILDAILFLYGIVLTLLYCRLKIQVRKAAITSYEKSDGVYTGLSTRNQETYETLKHEKPPQ

SEQ ID NO: 76639 - protein, 70 aa, synthetic construct
  REGION 1..70: note = P40259_160-229
GIIMIQTLLIILFIIVPIFLLLDKDDSKAGMEEDHTYEGLDIDQTATYEDIVTLRTGEVKWSVGEHPGQE

SEQ ID NO: 76640 - protein, 82 aa, synthetic construct
  REGION 1..82: note = P42081_248-329
WITAVLPTVIICVMVFCLILWKWKKKKRPRNSYKCGTNTMEREESEQTKKREKIHIPERSDEAQRVFKSSKTSSCDKSDTCF

SEQ ID NO: 76641 - protein, 82 aa, synthetic construct
  REGION 1..82: note = Q15762_255-336
GGTVLLLLFVISITTIIVIFLNRRRRRERRDLFTESWDTQKAPNNYRSPISTSQPTNQSMDDTREDIYVNYPTFSRRPKTRV

SEQ ID NO: 76642 - protein, 100 aa, synthetic construct
  REGION 1..100: note = Q685J3_4393-4493
LVGAGVVLMLIILVALLMLVFRSKREVKRQKYRLSQLYKWQEEDSGPAPGTFQNIGFDICQDDDSIHLESIYSNFQPSLRHIDPETKIRIQRPQVMTTSF

SEQ ID NO: 76643 - protein, 58 aa, synthetic construct
  REGION 1..58: note = Q9NNX6_1-58
MSDSKEPRLQQLGLLEEEQLRGLGFRQTRGYKSLAGCLGHGPLVLQLLSFTLLAGLLV

SEQ ID NO: 76644 - protein, 214 aa, synthetic construct
  REGION 1..214: note = Q9NR97_828-1041
AVILFFFTFFITTMVMLAALAHHLFYWDVWFIYNVCLAKVKGYRSLSTSQTFYDAYISYDTKDASVTDWVINELRYHLEESRDKNVLLCLEERDWDPGLAIIDNLMQSINQSKKTVFVLTKKYAKSWNFKTAFYLALQRLMDENMDVIIFILLEPVLQHSQYLRLRQRICKSSILQWPDNPKAEGLFWQTLRNVVLTENDSRYNNMYVDSIKQY

SEQ ID NO: 76645 - protein, 33 aa, synthetic construct
  REGION 1..33: note = P16671_440-472
LLGLIEMILLSVGVVMFVAFMISYCACRSKTIK

SEQ ID NO: 76646 - protein, 39 aa, synthetic construct
  REGION 1..39: note = P32248_153-191
DRYVAIVQAVSAHRHRARVLLISKLSCVGIWILATVLSI

SEQ ID NO: 76647 - protein, 42 aa, synthetic construct
  REGION 1..42: note = P32248_248-289
RTLLQARNFERNKAIKVIIAVVVVFIVFQLPYNGVVLAQTVA

SEQ ID NO: 76648 - RNA, 105 nt, synthetic construct
  misc_feature 1..105: note = A0A5B9
  source 1..105: mol_type = other RNA
accatcctctatgagatcttgctagggaaggccaccttgtatgccgtgctggtcagtgccctcgtgctgatggccatggtcaagagaaaggattccagaggctag

SEQ ID NO: 76649 - RNA, 75 nt, synthetic construct
  misc_feature 1..75: note = B7Z8K6
  source 1..75: mol_type = other RNA
cttgggctacgaatgctgtttgcaaagactgttgccgtcaattttctcttgactgccaagttatttttcttgtaa

SEQ ID NO: 76650 - RNA, 627 nt, synthetic construct
  misc_feature 1..627: note = B9A064
  source 1..627: mol_type = other RNA
accatcattggtgtgtcggtcctcagtgtgcttgtagtatctgttgtagcagttctggtctataagttctattttcacctgatgcttcttgctggctgcataaagtatggtagaggtgaaaacatctatgatgcctttgttatctactcaagccaggatgaggactgggtaaggaatgagctagtaaagaatttagaagaaggggtgcctccatttcagctctgccttcactacagagactttattcccggtgtggccattgctgccaacatcatccatgaaggtttccataaaagccgaaaggtgattgttgtggtgtcccagcacttcatccagagccgctggtgtatctttgaatatgagattgctcagacctggcagtttctgagcagtcgtgctggtatcatcttcattgtcctgcagaaggtggagaagaccctgctcaggcagcaggtggagctgtaccgccttctcagcaggaacacttacctggagtgggaggacagtgtcctggggcggcacatcttctggagacgactcagaaaagccctgctggatggtaaatcatggaatccagaaggaacagtgggtacaggatgcaattggcaggaagcaacatctatctga

SEQ ID NO: 76651 - RNA, 189 nt, synthetic construct
  misc_feature 1..189: note = O00206
  source 1..189: mol_type = other RNA
atggccctgattgtgctggggggcgtcgccggcctcctgcttttcattgggctaggcatcttcttctgtgtcaggtgccggcaccgaaggcgccaagcagagcggatgtctcagatcaagagactcctcagtgagaagaagacctgccagtgtcctcaccggtttcagaagacatgtagccccatttga

SEQ ID NO: 76652 - RNA, 84 nt, synthetic construct
  misc_feature 1..84: note = P01730
  source 1..84: mol_type = other RNA
atcctgctagggaaggccaccctgtatgctgtgctggtcagcgcccttgtgttgatggccatggtcaagagaaaggatttctga

SEQ ID NO: 76653 - RNA, 246 nt, synthetic construct
  misc_feature 1..246: note = P01850
  source 1..246: mol_type = other RNA
gtgatgtcggtggccacaattgtcatagtggacatctgcatcactgggggcttgctgctgctggtttactactggagcaagaatagaaaggccaaggccaagcctgtgacacgaggagcgggtgctggcggcaggcaaaggggacaaaacaaggagaggccaccacctgttcccaacccagactatgagcccatccggaaaggccagcgggacctgtattctggcctgaatcagagacgcatctga

SEQ ID NO: 76654 - RNA, 2190 nt, synthetic construct
  misc_feature 1..2190: note = P07766
  source 1..2190: mol_type = other RNA
gcactgatagcatttctggcatttctgattattgtgacatcaatagccctgcttgttgttctctacaaaatctatgatctacataagaaaagatcctgcaatttagatgaacagcaggagcttgttgaaagggatgatgaaaaacaactgatgaatgtggagccaatccatgcagatattttgttggaaacttataagaggaagattgctgatgaaggaagactttttctggctgaatttcagagcatcccgcgggtgttcagcaagtttcctataaaggaagctcgaaagccctttaaccagaataaaaaccgttatgttgacattcttccttatgattataaccgtgttgaactctctgagataaacggagatgcagggtcaaactacataaatgccagctatattgatggtttcaaagaacccaggaaatacattgctgcacaaggtcccagggatgaaactgttgatgatttctggaggatgatttgggaacagaaagccacagttattgtcatggtcactcgatgtgaagaaggaaacaggaacaagtgtgcagaatactggccgtcaatggaagagggcactcgggcttttggagatgttgttgtaaagatcaaccagcacaaaagatgtccagattacatcattcagaaattgaacattgtaaataaaaaagaaaaagcaactggaagagaggtgactcacattcagttcaccagctggccagaccacggggtgcctgaggatcctcacttgctcctcaaactgagaaggagagtgaatgccttcagcaatttcttcagtggtcccattgtggtgcactgcagtgctggtgttgggcgcacaggaacctatatcggaattgatgccatgctagaaggcctggaagccgagaacaaagtggatgtttatggttatgttgtcaagctaaggcgacagagatgcctgatggttcaagtagaggcccagtacatcttgatccatcaggctttggtggaatacaatcagtttggagaaacagaagtgaatttgtctgaattacatccatatctacataacatgaagaaaagggatccacccagtgagccgtctccactagaggctgaattccagagacttccttcatataggagctggaggacacagcacattggaaatcaagaagaaaataaaagtaaaaacaggaattctaatgtcatcccatatgactataacagagtgccacttaaacatgagctggaaatgagtaaagagagtgagcatgattcagatgaatcctctgatgatgacagtgattcagaggaaccaagcaaatacatcaatgcatcttttataatgagctactggaaacctgaagtgatgattgctgctcagggaccactgaaggagaccattggtgacttttggcagatgatcttccaaagaaaagtcaaagttattgttatgctgacagaactgaaacatggagaccaggaaatctgtgctcagtactggggagaaggaaagcaaacatatggagatattgaagttgacctgaaagacacagacaaatcttcaacttatacccttcgtgtctttgaactgagacattccaagaggaaagactctcgaactgtgtaccagtaccaatatacaaactggagtgtggagcagcttcctgcagaacccaaggaattaatctctatgattcaggtcgtcaaacaaaaacttccccagaagaattcctctgaagggaacaagcatcacaagagtacacctctactcattcactgcagggatggatctcagcaaacgggaatattttgtgctttgttaaatctcttagaaagtgcggaaacagaagaggtagtggatatttttcaagtggtaaaagctctacgcaaagctaggccaggcatggtttccacattcgagcaatatcaattcctatatgacgtcattgccagcacctaccctgctcagaatggacaagtaaagaaaaacaaccatcaagaagataaaattgaatttgataatgaagtggacaaagtaaagcaggatgctaattgtgttaatccacttggtgccccagaaaagctccctgaagcaaaggaacaggctgaaggttctgaacccacgagtggcactgaggggccagaacattctgtcaatggtcctgcaagtccagctttaaatcaaggttcatag

SEQ ID NO: 76655 - RNA, 141 nt, synthetic construct
  misc_feature 1..141: note = P08575
  source 1..141: mol_type = other RNA
gtctctttctgcttggtgatggtactcctttttgcagtggacacaggactatatttctctgtgaagacaaacattcgaagctcaacaagagactggaaggaccataaatttaaatggagaaaggaccctcaagacaaatga

SEQ ID NO: 76656 - RNA, 207 nt, synthetic construct
  misc_feature 1..207: note = P08637
  source 1..207: mol_type = other RNA
ttttgggtgctggtggtggttggtggagtcctggcttgctatagcttgctagtaacagtggcctttattattttctgggtgaggagtaagaggagcaggctcctgcacagtgactacatgaacatgactccccgccgccccgggcccacccgcaagcattaccagccctatgccccaccacgcgacttcgcagcctatcgctcctga

SEQ ID NO: 76657 - RNA, 252 nt, synthetic construct
  misc_feature 1..252: note = P10747
  source 1..252: mol_type = other RNA
atcatcacagccgaggggatcatcctcctgttctgcgcggtggtgcctgggacgctgctgctgttcaggaaacgatggcagaacgagaagctcgggttggatgccggggatgaatatgaagatgaaaacctttatgaaggcctgaacctggacgactgctccatgtatgaggacatctcccggggcctccagggcacctaccaggatgtgggcagcctcaacataggagatgtccagctggagaagccgtga

SEQ ID NO: 76658 - RNA, 798 nt, synthetic construct
  misc_feature 1..798: note = P11912
  source 1..798: mol_type = other RNA
gtctcagctgtgactttggcttatctgatcttctgcctgtgttcccttgtgggcattcttcatcttcaaagagccctggtcctgaggaggaaaagaaagcgaatgactgaccccaccaggagattcttcaaagtgacgcctcccccaggaagcgggccccagaaccagtacgggaacgtgctgtctctccccacacccacctcaggcctcggacgcgcccagcgttgggccgcaggcctggggggcactgccccgtcttatggaaacccgagcagcgacgtccaggcggatggagccttggggtcccggagcccgccgggagtgggcccagaagaagaggaaggggagggctatgaggaacctgacagtgaggaggactccgagttctatgagaacgactccaaccttgggcaggaccagctctcccaggatggcagcggctacgagaaccctgaggatgagcccctgggtcctgaggatgaagactccttctccaacgctgagtcttatgagaacgaggatgaagagctgacccagccggtcgccaggacaatggacttcctgagccctcatgggtcagcctgggaccccagccgggaagcaacctccctggggtcccagtcctatgaggatatgagaggaatcctgtatgcagccccccagctccgctccattcggggccagcctggacccaatcatgaggaagatgcagactcttatgagaacatggataatcccgatgggccagacccagcctggggaggagggggccgcatgggcacctggagcaccaggtga

SEQ ID NO: 76659 - RNA, 189 nt, synthetic construct
  misc_feature 1..189: note = P15391
  source 1..189: mol_type = other RNA
ttcctcctctggatccttgcagcagttagttcggggttgtttttttatagctttctcctcacagctgtttctttgagcaaaatgctaaagaaaagaagccctcttacaacaggggtctatgtgaaaatgcccccaacagagccagaatgtgaaaagcaatttcagccttattttattcccatcaattga

SEQ ID NO: 76660 - RNA, 219 nt, synthetic construct
  misc_feature 1..219: note = P16410
  source 1..219: mol_type = other RNA
atggggtggattcgtggtcggaggtctcgacacagctgggagatgagtgaatttcataattataacttggatctgaagaagagtgatttttcaacacgatggcaaaagcaaagatgtccagtagtcaaaagcaaatgtagagaaaatgcatctccattttttttctgctgcttcatcgctgtagccatgggaatccgtttcattattatggtagcatga

SEQ ID NO: 76661 - RNA, 192 nt, synthetic construct
  misc_feature 1..192: note = P16671
  source 1..192: mol_type = other RNA
ctctgctatatcctggatgccatcctgtttctgtatggaattgtcctcaccctcctctactgtcgactgaagatccaagtgcgaaaggcagctataaccagctatgagaaatcagatggtgtttacacgggcctgagcaccaggaaccaggagacttacgagactctgaagcatgagaaaccaccacagtag

SEQ ID NO: 76662 - RNA, 213 nt, synthetic construct
  misc_feature 1..213: note = P26718
  source 1..213: mol_type = other RNA
ggtatcatcatgatccagacgctgctgatcatcctcttcatcatcgtgcctatcttcctgctgctggacaaggatgacagcaaggctggcatggaggaagatcacacctacgagggcctggacattgaccagacagccacctatgaggacatagtgacgctgcggacaggggaagtgaagtggtctgtaggtgagcacccaggccaggagtga

SEQ ID NO: 76663 - RNA, 249 nt, synthetic construct
  misc_feature 1..249: note = P30273
  source 1..249: mol_type = other RNA
tggattacagctgtacttccaacagttattatatgtgtgatggttttctgtctaattctatggaaatggaagaagaagaagcggcctcgcaactcttataaatgtggaaccaacacaatggagagggaagagagtgaacagaccaagaaaagagaaaaaatccatatacctgaaagatctgatgaagcccagcgtgtttttaaaagttcgaagacatcttcatgcgacaaaagtgatacatgtttttaa

SEQ ID NO: 76664 - RNA, 249 nt, synthetic construct
  misc_feature 1..249: note = P32248
  source 1..249: mol_type = other RNA
ggagggacagttttattgttgttgtttgttatctcaattaccaccatcattgtcattttccttaacagaaggagaaggagagagagaagagatctatttacagagtcctgggatacacagaaggcacccaataactatagaagtcccatctctaccagtcaacctaccaatcaatccatggatgatacaagagaggatatttatgtcaactatccaaccttctctcgcagaccaaagactagagtttaa

SEQ ID NO: 76665 - RNA, 303 nt, synthetic construct
  misc_feature 1..303: note = P40259
  source 1..303: mol_type = other RNA
ctcgtgggggcaggggtcgtgctgatgctgatcatcctggtagctctcctgatgctcgttttccgctccaagagagaggtgaaacggcaaaagtacagattgtctcagttatacaagtggcaagaagaggacagtggaccagctcctgggaccttccaaaacattggctttgacatctgccaagatgatgattccatccacctggagtccatctatagtaatttccagccctccttgagacacatagaccctgaaacaaagatccgaattcagaggcctcaggtaatgacgacatcattttaa

SEQ ID NO: 76666 - RNA, 177 nt, synthetic construct
  misc_feature 1..177: note = P42081
  source 1..177: mol_type = other RNA
atgagtgactccaaggaaccaagactgcagcagctgggcctcctggaggaggaacagctgagaggccttggattccgacagactcgaggatacaagagcttagcagggtgtcttggccatggtcccctggtgctgcaactcctctccttcacgctcttggctgggctccttgtctga

SEQ ID NO: 76667 - RNA, 645 nt, synthetic construct
  misc_feature 1..645: note = Q15762
  source 1..645: mol_type = other RNA
gcagtgatattatttttcttcacgttctttatcaccaccatggttatgttggctgccctggctcaccatttgttttactgggatgtttggtttatatataatgtgtgtttagctaaggtaaaaggctacaggtctctttccacatcccaaactttctatgatgcttacatttcttatgacaccaaagatgcctctgttactgactgggtgataaatgagctgcgctaccaccttgaagagagccgagacaaaaacgttctcctttgtctagaggagagggattgggacccgggattggccatcatcgacaacctcatgcagagcatcaaccaaagcaagaaaacagtatttgttttaaccaaaaaatatgcaaaaagctggaactttaaaacagctttttacttggctttgcagaggctaatggatgagaacatggatgtgattatatttatcctgctggagccagtgttacagcattctcagtatttgaggctacggcagcggatctgtaagagctccatcctccagtggcctgacaacccgaaggcagaaggcttgttttggcaaactctgagaaatgtggtcttgactgaaaatgattcacggtataacaatatgtatgtcgattccattaagcaatactaa

SEQ ID NO: 76668 - RNA, 102 nt, synthetic construct
  misc_feature 1..102: note = Q685J3
  source 1..102: mol_type = other RNA
ctccttggcctgatagaaatgatcttactcagtgttggtgtggtgatgtttgttgcttttatgatttcatattgtgcatgcagatcgaaaacaataaaataa

SEQ ID NO: 76669 - RNA, 120 nt, synthetic construct
  misc_feature 1..120: note = Q9NNX6
  source 1..120: mol_type = other RNA
gaccgctacgtggccatcgtccaggctgtctcagctcaccgccaccgtgcccgcgtccttctcatcagcaagctgtcctgtgtgggcatctggatactagccacagtgctctccatctga

SEQ ID NO: 76670 - RNA, 129 nt, synthetic construct
  misc_feature 1..129: note = Q9NR97
  source 1..129: mol_type = other RNA
cgcaccctgctccaggcacgcaactttgagcgcaacaaggccatcaaggtgatcatcgctgtggtcgtggtcttcatagtcttccagctgccctacaatggggtggtcctggcccagacggtggcctga

SEQ ID NO: 76671 - RNA, 105 nt, synthetic construct
  misc_feature 1..105: note = A0A5B9
  source 1..105: mol_type = other RNA
accatcctgtacgagatcctcctgggcaaggccaccctgtacgccgtgctcgtcagcgcgctggtgctgatggccatggtgaagcgcaaggactcccgggggtga

SEQ ID NO: 76672 - RNA, 75 nt, synthetic construct
  misc_feature 1..75: note = B7Z8K6
  source 1..75: mol_type = other RNA
ctgggcctccgcatgctgttcgccaagaccgtggccgtcaacttcctgctcaccgcgaagctgttcttcctgtga

SEQ ID NO: 76673 - RNA, 627 nt, synthetic construct
  misc_feature 1..627: note = B9A064
  source 1..627: mol_type = other RNA
accatcatcggcgtgagcgtcctgtccgtgctcgtggtcagcgtggtggccgtcctggtgtacaagttctacttccacctgatgctcctggccgggtgcatcaagtacggccgcggggagaacatctacgacgcgttcgtgatctactccagccaggacgaggactgggtccggaacgagctggtgaagaacctcgaggagggcgtgcccccgttccagctgtgcctgcactaccgcgacttcatccccggggtcgccatcgccgccaacatcatccacgagggcttccacaagtcccggaaggtgatcgtggtcgtgagccagcacttcatccagtcccgctggtgcatcttcgagtacgagatcgcccagacctggcagttcctcagctcccgggcgggcatcatcttcatcgtgctgcagaaggtcgagaagacgctgctccgccagcaggtcgagctgtaccggctgctcagccgcaacacctacctggagtgggaggactccgtgctggggcggcacatcttctggcgccggctccgcaaggccctgctggacggcaagagctggaaccccgaggggaccgtgggcaccgggtgcaactggcaggaggccacgtccatctga

SEQ ID NO: 76674 - RNA, 189 nt, synthetic construct
  misc_feature 1..189: note = O00206
  source 1..189: mol_type = other RNA
atggccctgatcgtgctcggcggggtcgccggcctgctcctgttcatcgggctgggcatcttcttctgcgtgcgctgccggcaccgccggcgccaggcggagcggatgagccagatcaagcgcctgctctccgagaagaagacctgccagtgcccccaccggttccagaagacctgcagcccgatctga

SEQ ID NO: 76675 - RNA, 84 nt, synthetic construct
  misc_feature 1..84: note = P01730
  source 1..84: mol_type = other RNA
atcctgctcggcaaggccaccctgtacgccgtgctggtcagcgcgctcgtgctgatggccatggtgaagcgcaaggacttctga

SEQ ID NO: 76676 - RNA, 246 nt, synthetic construct
  misc_feature 1..246: note = P01850
  source 1..246: mol_type = other RNA
gtgatgagcgtcgccaccatcgtgatcgtggacatctgcatcaccggcgggctgctcctgctggtctactactggtccaagaaccgcaaggccaaggcgaagcccgtgacgcggggcgccggggccggcgggcgccagcggggccagaacaaggagcgcccgccgcccgtgcccaaccccgactacgagcccatccggaagggccagcgcgacctctacagcgggctgaaccagcggcgcatctga

SEQ ID NO: 76677 - RNA, 2190 nt, synthetic construct
  misc_feature 1..2190: note = P07766
  source 1..2190: mol_type = other RNA
gccctgatcgccttcctcgcgttcctgatcatcgtgaccagcatcgccctgctcgtcgtgctgtacaagatctacgacctgcacaagaagcgctcctgcaacctcgacgagcagcaggagctggtggagcgggacgacgagaagcagctgatgaacgtcgagcccatccacgccgacatcctcctggagacctacaagcgcaagatcgccgacgagggccggctgttcctcgccgagttccagagcatcccgcgcgtgttctccaagttccccatcaaggaggcgcggaagcccttcaaccagaacaagaaccgctacgtggacatcctgccctacgactacaaccgggtcgagctgagcgagatcaacggggacgccggctccaactacatcaacgccagctacatcgacgggttcaaggagccgcgcaagtacatcgccgcgcagggcccccgggacgagacggtggacgacttctggcgcatgatctgggagcagaaggccaccgtgatcgtcatggtgacccggtgcgaggaggggaaccgcaacaagtgcgccgagtactggccctccatggaggagggcacccgggccttcggcgacgtggtcgtgaagatcaaccagcacaagcgctgccccgactacatcatccagaagctcaacatcgtgaacaagaaggagaaggccacggggcgggaggtcacccacatccagttcaccagctggccggaccacggcgtgcccgaggacccccacctcctgctgaagctgcgccggcgcgtgaacgcgttctccaacttcttcagcgggcccatcgtcgtgcactgctccgccggcgtggggcggaccggcacgtacatcggcatcgacgccatgctggaggggctcgaggccgagaacaaggtcgacgtgtacggctacgtggtcaagctgcgccggcagcgctgcctgatggtgcaggtcgaggcccagtacatcctcatccaccaggcgctggtggagtacaaccagttcggggagaccgaggtgaacctgagcgagctccacccgtacctgcacaacatgaagaagcgcgacccgccctccgagcccagccccctggaggccgagttccagcggctcccctcctaccgcagctggcggacccagcacatcggcaaccaggaggagaacaagtccaagaaccgcaacagcaacgtcatcccctacgactacaaccgggtgcccctgaagcacgagctggagatgtccaaggagagcgagcacgacagcgacgagtccagcgacgacgactccgacagcgaggagccgtccaagtacatcaacgccagcttcatcatgtcctactggaagcccgaggtgatgatcgccgcccagggccccctcaaggagaccatcggggacttctggcagatgatcttccagcgcaaggtcaaggtgatcgtgatgctgacggagctgaagcacggcgaccaggagatctgcgcgcagtactggggcgaggggaagcagacctacggggacatcgaggtcgacctcaaggacaccgacaagagctccacctacacgctgcgggtgttcgagctgcgccacagcaagcggaaggactcccgcaccgtgtaccagtaccagtacaccaactggagcgtcgagcagctccccgccgagccgaaggagctgatctccatgatccaggtggtgaagcagaagctgccccagaagaacagctccgagggcaacaagcaccacaagagcacgcccctcctgatccactgccgggacggctcccagcagaccgggatcttctgcgccctgctcaacctgctggagagcgccgagaccgaggaggtcgtggacatcttccaggtggtcaaggccctccgcaaggcgcggcccggcatggtgtccaccttcgagcagtaccagttcctgtacgacgtgatcgccagcacctacccggcccagaacgggcaggtcaagaagaacaaccaccaggaggacaagatcgagttcgacaacgaggtggacaaggtgaagcaggacgccaactgcgtcaaccccctgggcgcgcccgagaagctgccggaggccaaggagcaggccgaggggagcgagcccacgtccggcaccgagggccccgagcacagcgtgaacgggcccgcctccccggccctcaaccagggcagctga

SEQ ID NO: 76678 - RNA, 141 nt, synthetic construct
  misc_feature 1..141: note = P08575
  source 1..141: mol_type = other RNA
gtgagcttctgcctggtcatggtgctcctgttcgccgtggacaccggcctgtacttctccgtcaagaccaacatccgcagctccacgcgggactggaaggaccacaagttcaagtggcgcaaggacccccaggacaagtga

SEQ ID NO: 76679 - RNA, 207 nt, synthetic construct
  misc_feature 1..207: note = P08637
  source 1..207: mol_type = other RNA
ttctgggtgctggtcgtggtgggcggggtcctcgcctgctacagcctgctggtgaccgtggccttcatcatcttctgggtccgctccaagcggagccgcctcctgcactccgactacatgaacatgacgccccggcgcccgggccccacccggaagcactaccagccctacgcgcccccgcgcgacttcgccgcctaccggagctga

SEQ ID NO: 76680 - RNA, 252 nt, synthetic construct
  misc_feature 1..252: note = P10747
  source 1..252: mol_type = other RNA
atcatcaccgccgagggcatcatcctgctgttctgcgccgtggtccccgggaccctgctcctcttccgcaagcggtggcagaacgagaagctgggcctggacgcgggggacgagtacgaggacgagaacctctacgagggcctgaacctggacgactgcagcatgtacgaggacatctcccgcgggctccagggcacgtaccaggacgtgggcagcctgaacatcggggacgtgcagctggagaagccgtga

SEQ ID NO: 76681 - RNA, 798 nt, synthetic construct
  misc_feature 1..798: note = P11912
  source 1..798: mol_type = other RNA
gtgagcgccgtcaccctggcctacctcatcttctgcctgtgctccctggtgggcatcctccacctccagcgcgcgctggtgctgcggcgcaagcggaagcgcatgaccgaccccacgcggcgcttcttcaaggtcaccccgccgcccgggagcggcccccagaaccagtacgggaacgtgctgtccctgcccacccccaccagcggcctcgggcgggcccagcgctgggccgccggcctgggcgggacggccccctcctacggcaaccccagctccgacgtgcaggcggacggggccctgggcagccggtccccgcccggggtcggccccgaggaggaggagggcgaggggtacgaggagcccgacagcgaggaggactccgagttctacgagaacgacagcaacctcggccaggaccagctgtcccaggacgggagcggctacgagaacccggaggacgagcccctgggccccgaggacgaggactccttcagcaacgccgagtcctacgagaacgaggacgaggagctcacccagcccgtggcccgcaccatggacttcctgagcccgcacgggtccgcgtgggaccccagccgggaggccaccagcctgggctcccagagctacgaggacatgcgcgggatcctctacgccgcgccccagctgcggtccatccgcggccagcccgggccgaaccacgaggaggacgccgacagctacgagaacatggacaaccccgacggccccgaccccgcctggggcgggggcgggcggatgggcacgtggtccacccgctga

SEQ ID NO: 76682 - RNA, 189 nt, synthetic construct
  misc_feature 1..189: note = P15391
  source 1..189: mol_type = other RNA
ttcctgctctggatcctggccgccgtgtcctccggcctgttcttctacagcttcctcctgaccgcggtctccctgagcaagatgctcaagaagcgcagccccctgaccacgggggtgtacgtgaagatgccgcccaccgagcccgagtgcgagaagcagttccagccctacttcatcccgatcaactga

SEQ ID NO: 76683 - RNA, 219 nt, synthetic construct
  misc_feature 1..219: note = P16410
  source 1..219: mol_type = other RNA
atgggctggatccgcgggcggcgcagccggcactcctgggagatgagcgagttccacaactacaacctggacctcaagaagtccgacttcagcacccgctggcagaagcagcggtgccccgtggtcaagtccaagtgccgcgagaacgccagcccgttcttcttctgctgcttcatcgccgtggcgatgggcatccggttcatcatcatggtggcctga

SEQ ID NO: 76684 - RNA, 192 nt, synthetic construct
  misc_feature 1..192: note = P16671
  source 1..192: mol_type = other RNA
ctgtgctacatcctcgacgccatcctgttcctgtacggcatcgtgctcaccctgctgtactgccgcctcaagatccaggtccggaaggccgcgatcaccagctacgagaagtccgacggggtgtacacgggcctgagcacccgcaaccaggagacctacgagaccctgaagcacgagaagcccccgcagtga

SEQ ID NO: 76685 - RNA, 213 nt, synthetic construct
  misc_feature 1..213: note = P26718
  source 1..213: mol_type = other RNA
ggcatcatcatgatccagaccctgctcatcatcctgttcatcatcgtgcccatcttcctgctcctggacaaggacgacagcaaggccgggatggaggaggaccacacctacgagggcctggacatcgaccagacggccacctacgaggacatcgtcaccctccgcaccggggaggtgaagtggtccgtgggcgagcacccggggcaggagtga

SEQ ID NO: 76686 - RNA, 249 nt, synthetic construct
  misc_feature 1..249: note = P30273
  source 1..249: mol_type = other RNA
tggatcaccgccgtgctgcccaccgtcatcatctgcgtgatggtgttctgcctcatcctgtggaagtggaagaagaagaagcgcccgcggaacagctacaagtgcggcacgaacaccatggagcgcgaggagtccgagcagaccaagaagcgggagaagatccacatccccgagcgcagcgacgaggcccagcgggtcttcaagtccagcaagacctccagctgcgacaagtccgacacgtgcttctga

SEQ ID NO: 76687 - RNA, 249 nt, synthetic construct
  misc_feature 1..249: note = P32248
  source 1..249: mol_type = other RNA
ggcgggaccgtgctgctcctgctgttcgtcatcagcatcaccacgatcatcgtgatcttcctcaaccgccggcgccggcgcgagcggcgcgacctgttcaccgagtcctgggacacccagaaggcccccaacaactaccggagcccgatctccaccagccagcccacgaaccagtccatggacgacacccgcgaggacatctacgtgaactaccccaccttcagccggcgccccaagacccgggtctga

SEQ ID NO: 76688 - RNA, 303 nt, synthetic construct
  misc_feature 1..303: note = P40259
  source 1..303: mol_type = other RNA
ctggtgggcgccggggtcgtgctcatgctgatcatcctggtggccctcctgatgctggtcttccgcagcaagcgggaggtgaagcgccagaagtaccggctctcccagctgtacaagtggcaggaggaggacagcggccccgcgccggggaccttccagaacatcggcttcgacatctgccaggacgacgactccatccacctggagagcatctactccaacttccagcccagcctccgccacatcgaccccgagaccaagatccggatccagcgcccccaggtgatgacgacctccttctga

SEQ ID NO: 76689 - RNA, 177 nt, synthetic construct
  misc_feature 1..177: note = P42081
  source 1..177: mol_type = other RNA
atgagcgactccaaggagccccgcctgcagcagctcggcctgctggaggaggagcagctccgggggctgggcttccgccagacccgggggtacaagagcctggccggctgcctcgggcacggcccgctggtgctgcagctcctgtccttcaccctgctcgccggcctgctggtctga

SEQ ID NO: 76690 - RNA, 645 nt, synthetic construct
  misc_feature 1..645: note = Q15762
  source 1..645: mol_type = other RNA
gccgtgatcctgttcttcttcaccttcttcatcaccacgatggtcatgctcgccgcgctggcccaccacctgttctactgggacgtgtggttcatctacaacgtgtgcctcgccaaggtcaagggctaccgcagcctgtccaccagccagaccttctacgacgcctacatctcctacgacaccaaggacgccagcgtgacggactgggtgatcaacgagctgcggtaccacctcgaggagtcccgcgacaagaacgtcctgctgtgcctcgaggagcgggactgggaccccgggctggcgatcatcgacaacctgatgcagagcatcaaccagtccaagaagaccgtgttcgtgctcaccaagaagtacgccaagagctggaacttcaagaccgccttctacctggccctgcagcgcctcatggacgagaacatggacgtcatcatcttcatcctgctggagccggtgctccagcactcccagtacctgcggctgcgccagcggatctgcaagagctccatcctccagtggcccgacaaccccaaggcggagggcctgttctggcagacgctgcgcaacgtggtcctcaccgagaacgacagccggtacaacaacatgtacgtggactccatcaagcagtactga

SEQ ID NO: 76691 - RNA, 102 nt, synthetic construct
  misc_feature 1..102: note = Q685J3
  source 1..102: mol_type = other RNA
ctgctcggcctgatcgagatgatcctgctcagcgtgggggtcgtgatgttcgtggccttcatgatctcctactgcgcctgccgcagcaagaccatcaagtga

SEQ ID NO: 76692 - RNA, 120 nt, synthetic construct
  misc_feature 1..120: note = Q9NNX6
  source 1..120: mol_type = other RNA
gaccgctacgtggccatcgtccaggccgtgagcgcgcaccggcaccgcgcccgggtgctgctcatctccaagctgagctgcgtcggcatctggatcctggccaccgtgctctccatctga

SEQ ID NO: 76693 - RNA, 129 nt, synthetic construct
  misc_feature 1..129: note = Q9NR97
  source 1..129: mol_type = other RNA
cgcaccctgctccaggcccggaacttcgagcgcaacaaggccatcaaggtgatcatcgcggtcgtggtggtcttcatcgtgttccagctgccctacaacggcgtggtcctggcccagaccgtggcctga

SEQ ID NO: 76694 - RNA, 105 nt, synthetic construct
  misc_feature 1..105: note = A0A5B9
  source 1..105: mol_type = other RNA
accatcctctacgagatcctcctcggcaaggccaccctctacgccgtcctcgtctccgccctcgtcctcatggccatggtcaagcgcaaggactcccgcggctga

SEQ ID NO: 76695 - RNA, 75 nt, synthetic construct
  misc_feature 1..75: note = B7Z8K6
  source 1..75: mol_type = other RNA
ctcggcctccgcatgctcttcgccaagaccgtcgccgtcaacttcctcctcaccgccaagctcttcttcctctga

SEQ ID NO: 76696 - RNA, 627 nt, synthetic construct
  misc_feature 1..627: note = B9A064
  source 1..627: mol_type = other RNA
accatcatcggcgtctccgtcctctccgtcctcgtcgtctccgtcgtcgccgtcctcgtctacaagttctacttccacctcatgctcctcgccggctgcatcaagtacggccgcggcgagaacatctacgacgccttcgtcatctactcctcccaggacgaggactgggtccgcaacgagctcgtcaagaacctcgaggagggcgtcccccccttccagctctgcctccactaccgcgacttcatccccggcgtcgccatcgccgccaacatcatccacgagggcttccacaagtcccgcaaggtcatcgtcgtcgtctcccagcacttcatccagtcccgctggtgcatcttcgagtacgagatcgcccagacctggcagttcctctcctcccgcgccggcatcatcttcatcgtcctccagaaggtcgagaagaccctcctccgccagcaggtcgagctctaccgcctcctctcccgcaacacctacctcgagtgggaggactccgtcctcggccgccacatcttctggcgccgcctccgcaaggccctcctcgacggcaagtcctggaaccccgagggcaccgtcggcaccggctgcaactggcaggaggccacctccatctga

SEQ ID NO: 76697 - RNA, 189 nt, synthetic construct
  misc_feature 1..189: note = O00206
  source 1..189: mol_type = other RNA
atggccctcatcgtcctcggcggcgtcgccggcctcctcctcttcatcggcctcggcatcttcttctgcgtccgctgccgccaccgccgccgccaggccgagcgcatgtcccagatcaagcgcctcctctccgagaagaagacctgccagtgcccccaccgcttccagaagacctgctcccccatctga

SEQ ID NO: 76698 - RNA, 84 nt, synthetic construct
  misc_feature 1..84: note = P01730
  source 1..84: mol_type = other RNA
atcctcctcggcaaggccaccctctacgccgtcctcgtctccgccctcgtcctcatggccatggtcaagcgcaaggacttctga

SEQ ID NO: 76699 - RNA, 246 nt, synthetic construct
  misc_feature 1..246: note = P01850
  source 1..246: mol_type = other RNA
gtcatgtccgtcgccaccatcgtcatcgtcgacatctgcatcaccggcggcctcctcctcctcgtctactactggtccaagaaccgcaaggccaaggccaagcccgtcacccgcggcgccggcgccggcggccgccagcgcggccagaacaaggagcgccccccccccgtccccaaccccgactacgagcccatccgcaagggccagcgcgacctctactccggcctcaaccagcgccgcatctga

SEQ ID NO: 76700 - RNA, 2190 nt, synthetic construct
  misc_feature 1..2190: note = P07766
  source 1..2190: mol_type = other RNA
gccctcatcgccttcctcgccttcctcatcatcgtcacctccatcgccctcctcgtcgtcctctacaagatctacgacctccacaagaagcgctcctgcaacctcgacgagcagcaggagctcgtcgagcgcgacgacgagaagcagctcatgaacgtcgagcccatccacgccgacatcctcctcgagacctacaagcgcaagatcgccgacgagggccgcctcttcctcgccgagttccagtccatcccccgcgtcttctccaagttccccatcaaggaggcccgcaagcccttcaaccagaacaagaaccgctacgtcgacatcctcccctacgactacaaccgcgtcgagctctccgagatcaacggcgacgccggctccaactacatcaacgcctcctacatcgacggcttcaaggagccccgcaagtacatcgccgcccagggcccccgcgacgagaccgtcgacgacttctggcgcatgatctgggagcagaaggccaccgtcatcgtcatggtcacccgctgcgaggagggcaaccgcaacaagtgcgccgagtactggccctccatggaggagggcacccgcgccttcggcgacgtcgtcgtcaagatcaaccagcacaagcgctgccccgactacatcatccagaagctcaacatcgtcaacaagaaggagaaggccaccggccgcgaggtcacccacatccagttcacctcctggcccgaccacggcgtccccgaggacccccacctcctcctcaagctccgccgccgcgtcaacgccttctccaacttcttctccggccccatcgtcgtccactgctccgccggcgtcggccgcaccggcacctacatcggcatcgacgccatgctcgagggcctcgaggccgagaacaaggtcgacgtctacggctacgtcgtcaagctccgccgccagcgctgcctcatggtccaggtcgaggcccagtacatcctcatccaccaggccctcgtcgagtacaaccagttcggcgagaccgaggtcaacctctccgagctccacccctacctccacaacatgaagaagcgcgaccccccctccgagccctcccccctcgaggccgagttccagcgcctcccctcctaccgctcctggcgcacccagcacatcggcaaccaggaggagaacaagtccaagaaccgcaactccaacgtcatcccctacgactacaaccgcgtccccctcaagcacgagctcgagatgtccaaggagtccgagcacgactccgacgagtcctccgacgacgactccgactccgaggagccctccaagtacatcaacgcctccttcatcatgtcctactggaagcccgaggtcatgatcgccgcccagggccccctcaaggagaccatcggcgacttctggcagatgatcttccagcgcaaggtcaaggtcatcgtcatgctcaccgagctcaagcacggcgaccaggagatctgcgcccagtactggggcgagggcaagcagacctacggcgacatcgaggtcgacctcaaggacaccgacaagtcctccacctacaccctccgcgtcttcgagctccgccactccaagcgcaaggactcccgcaccgtctaccagtaccagtacaccaactggtccgtcgagcagctccccgccgagcccaaggagctcatctccatgatccaggtcgtcaagcagaagctcccccagaagaactcctccgagggcaacaagcaccacaagtccacccccctcctcatccactgccgcgacggctcccagcagaccggcatcttctgcgccctcctcaacctcctcgagtccgccgagaccgaggaggtcgtcgacatcttccaggtcgtcaaggccctccgcaaggcccgccccggcatggtctccaccttcgagcagtaccagttcctctacgacgtcatcgcctccacctaccccgcccagaacggccaggtcaagaagaacaaccaccaggaggacaagatcgagttcgacaacgaggtcgacaaggtcaagcaggacgccaactgcgtcaaccccctcggcgcccccgagaagctccccgaggccaaggagcaggccgagggctccgagcccacctccggcaccgagggccccgagcactccgtcaacggccccgcctcccccgccctcaaccagggctcctga

SEQ ID NO: 76701 - RNA, 141 nt, synthetic construct
  misc_feature 1..141: note = P08575
  source 1..141: mol_type = other RNA
gtctccttctgcctcgtcatggtcctcctcttcgccgtcgacaccggcctctacttctccgtcaagaccaacatccgctcctccacccgcgactggaaggaccacaagttcaagtggcgcaaggacccccaggacaagtga

SEQ ID NO: 76702 - RNA, 207 nt, synthetic construct
  misc_feature 1..207: note = P08637
  source 1..207: mol_type = other RNA
ttctgggtcctcgtcgtcgtcggcggcgtcctcgcctgctactccctcctcgtcaccgtcgccttcatcatcttctgggtccgctccaagcgctcccgcctcctccactccgactacatgaacatgaccccccgccgccccggccccacccgcaagcactaccagccctacgcccccccccgcgacttcgccgcctaccgctcctga

SEQ ID NO: 76703 - RNA, 252 nt, synthetic construct
  misc_feature 1..252: note = P10747
  source 1..252: mol_type = other RNA
atcatcaccgccgagggcatcatcctcctcttctgcgccgtcgtccccggcaccctcctcctcttccgcaagcgctggcagaacgagaagctcggcctcgacgccggcgacgagtacgaggacgagaacctctacgagggcctcaacctcgacgactgctccatgtacgaggacatctcccgcggcctccagggcacctaccaggacgtcggctccctcaacatcggcgacgtccagctcgagaagccctga

SEQ ID NO: 76704 - RNA, 798 nt, synthetic construct
  misc_feature 1..798: note = P11912
  source 1..798: mol_type = other RNA
gtctccgccgtcaccctcgcctacctcatcttctgcctctgctccctcgtcggcatcctccacctccagcgcgccctcgtcctccgccgcaagcgcaagcgcatgaccgaccccacccgccgcttcttcaaggtcacccccccccccggctccggcccccagaaccagtacggcaacgtcctctccctccccacccccacctccggcctcggccgcgcccagcgctgggccgccggcctcggcggcaccgccccctcctacggcaacccctcctccgacgtccaggccgacggcgccctcggctcccgctccccccccggcgtcggccccgaggaggaggagggcgagggctacgaggagcccgactccgaggaggactccgagttctacgagaacgactccaacctcggccaggaccagctctcccaggacggctccggctacgagaaccccgaggacgagcccctcggccccgaggacgaggactccttctccaacgccgagtcctacgagaacgaggacgaggagctcacccagcccgtcgcccgcaccatggacttcctctccccccacggctccgcctgggacccctcccgcgaggccacctccctcggctcccagtcctacgaggacatgcgcggcatcctctacgccgccccccagctccgctccatccgcggccagcccggccccaaccacgaggaggacgccgactcctacgagaacatggacaaccccgacggccccgaccccgcctggggcggcggcggccgcatgggcacctggtccacccgctga

SEQ ID NO: 76705 - RNA, 189 nt, synthetic construct
  misc_feature 1..189: note = P15391
  source 1..189: mol_type = other RNA
ttcctcctctggatcctcgccgccgtctcctccggcctcttcttctactccttcctcctcaccgccgtctccctctccaagatgctcaagaagcgctcccccctcaccaccggcgtctacgtcaagatgccccccaccgagcccgagtgcgagaagcagttccagccctacttcatccccatcaactga

SEQ ID NO: 76706 - RNA, 219 nt, synthetic construct
  misc_feature 1..219: note = P16410
  source 1..219: mol_type = other RNA
atgggctggatccgcggccgccgctcccgccactcctgggagatgtccgagttccacaactacaacctcgacctcaagaagtccgacttctccacccgctggcagaagcagcgctgccccgtcgtcaagtccaagtgccgcgagaacgcctcccccttcttcttctgctgcttcatcgccgtcgccatgggcatccgcttcatcatcatggtcgcctga

SEQ ID NO: 76707 - RNA, 192 nt, synthetic construct
  misc_feature 1..192: note = P16671
  source 1..192: mol_type = other RNA
ctctgctacatcctcgacgccatcctcttcctctacggcatcgtcctcaccctcctctactgccgcctcaagatccaggtccgcaaggccgccatcacctcctacgagaagtccgacggcgtctacaccggcctctccacccgcaaccaggagacctacgagaccctcaagcacgagaagcccccccagtga

SEQ ID NO: 76708 - RNA, 213 nt, synthetic construct
  misc_feature 1..213: note = P26718
  source 1..213: mol_type = other RNA
ggcatcatcatgatccagaccctcctcatcatcctcttcatcatcgtccccatcttcctcctcctcgacaaggacgactccaaggccggcatggaggaggaccacacctacgagggcctcgacatcgaccagaccgccacctacgaggacatcgtcaccctccgcaccggcgaggtcaagtggtccgtcggcgagcaccccggccaggagtga

SEQ ID NO: 76709 - RNA, 249 nt, synthetic construct
  misc_feature 1..249: note = P30273
  source 1..249: mol_type = other RNA
tggatcaccgccgtcctccccaccgtcatcatctgcgtcatggtcttctgcctcatcctctggaagtggaagaagaagaagcgcccccgcaactcctacaagtgcggcaccaacaccatggagcgcgaggagtccgagcagaccaagaagcgcgagaagatccacatccccgagcgctccgacgaggcccagcgcgtcttcaagtcctccaagacctcctcctgcgacaagtccgacacctgcttctga

SEQ ID NO: 76710 - RNA, 249 nt, synthetic construct
  misc_feature 1..249: note = P32248
  source 1..249: mol_type = other RNA
ggcggcaccgtcctcctcctcctcttcgtcatctccatcaccaccatcatcgtcatcttcctcaaccgccgccgccgccgcgagcgccgcgacctcttcaccgagtcctgggacacccagaaggcccccaacaactaccgctcccccatctccacctcccagcccaccaaccagtccatggacgacacccgcgaggacatctacgtcaactaccccaccttctcccgccgccccaagacccgcgtctga

SEQ ID NO: 76711 - RNA, 303 nt, synthetic construct
  misc_feature 1..303: note = P40259
  source 1..303: mol_type = other RNA
ctcgtcggcgccggcgtcgtcctcatgctcatcatcctcgtcgccctcctcatgctcgtcttccgctccaagcgcgaggtcaagcgccagaagtaccgcctctcccagctctacaagtggcaggaggaggactccggccccgcccccggcaccttccagaacatcggcttcgacatctgccaggacgacgactccatccacctcgagtccatctactccaacttccagccctccctccgccacatcgaccccgagaccaagatccgcatccagcgcccccaggtcatgaccacctccttctga

SEQ ID NO: 76712 - RNA, 177 nt, synthetic construct
  misc_feature 1..177: note = P42081
  source 1..177: mol_type = other RNA
atgtccgactccaaggagccccgcctccagcagctcggcctcctcgaggaggagcagctccgcggcctcggcttccgccagacccgcggctacaagtccctcgccggctgcctcggccacggccccctcgtcctccagctcctctccttcaccctcctcgccggcctcctcgtctga

SEQ ID NO: 76713 - RNA, 645 nt, synthetic construct
  misc_feature 1..645: note = Q15762
  source 1..645: mol_type = other RNA
gccgtcatcctcttcttcttcaccttcttcatcaccaccatggtcatgctcgccgccctcgcccaccacctcttctactgggacgtctggttcatctacaacgtctgcctcgccaaggtcaagggctaccgctccctctccacctcccagaccttctacgacgcctacatctcctacgacaccaaggacgcctccgtcaccgactgggtcatcaacgagctccgctaccacctcgaggagtcccgcgacaagaacgtcctcctctgcctcgaggagcgcgactgggaccccggcctcgccatcatcgacaacctcatgcagtccatcaaccagtccaagaagaccgtcttcgtcctcaccaagaagtacgccaagtcctggaacttcaagaccgccttctacctcgccctccagcgcctcatggacgagaacatggacgtcatcatcttcatcctcctcgagcccgtcctccagcactcccagtacctccgcctccgccagcgcatctgcaagtcctccatcctccagtggcccgacaaccccaaggccgagggcctcttctggcagaccctccgcaacgtcgtcctcaccgagaacgactcccgctacaacaacatgtacgtcgactccatcaagcagtactga

SEQ ID NO: 76714 - RNA, 102 nt, synthetic construct
  misc_feature 1..102: note = Q685J3
  source 1..102: mol_type = other RNA
ctcctcggcctcatcgagatgatcctcctctccgtcggcgtcgtcatgttcgtcgccttcatgatctcctactgcgcctgccgctccaagaccatcaagtga

SEQ ID NO: 76715 - RNA, 120 nt, synthetic construct
  misc_feature 1..120: note = Q9NNX6
  source 1..120: mol_type = other RNA
gaccgctacgtcgccatcgtccaggccgtctccgcccaccgccaccgcgcccgcgtcctcctcatctccaagctctcctgcgtcggcatctggatcctcgccaccgtcctctccatctga

SEQ ID NO: 76716 - RNA, 129 nt, synthetic construct
  misc_feature 1..129: note = Q9NR97
  source 1..129: mol_type = other RNA
cgcaccctcctccaggcccgcaacttcgagcgcaacaaggccatcaaggtcatcatcgccgtcgtcgtcgtcttcatcgtcttccagctcccctacaacggcgtcgtcctcgcccagaccgtcgcctga

SEQ ID NO: 76717 - RNA, 105 nt, synthetic construct
  misc_feature 1..105: note = A0A5B9
  source 1..105: mol_type = other RNA
accatcctgtacgagattctccttggcaaggccacactgtatgctgtgttggtcagcgcattagttctgatggccatggtgaaaagaaaggactccagggggtga

SEQ ID NO: 76718 - RNA, 75 nt, synthetic construct
  misc_feature 1..75: note = B7Z8K6
  source 1..75: mol_type = other RNA
ctgggcctcagaatgcttttcgccaagaccgtggctgtcaactttctgttgacagcaaaattattctttctgtga

SEQ ID NO: 76719 - RNA, 627 nt, synthetic construct
  misc_feature 1..627: note = B9A064
  source 1..627: mol_type = other RNA
accatcattggcgtgagcgtcctgtccgttctcgtggtatctgtggtcgccgtgcttgtttacaagttctattttcacctgatgttgttagctgggtgcataaaatacggaagaggtgagaacatctatgacgcattcgtgatttactcaagtcaggatgaagactgggtcaggaatgagctggtgaagaacctagaagagggcgtacccccttttcaactctgtctgcattatcgggatttcatcccaggggttgccattgcggctaatatcatacacgaaggatttcataaaagccgcaaggtgatcgtcgtggtgtcccagcacttcattcagtctcgatggtgcatctttgagtacgagattgcccagacatggcaattcctttcgtcacgtgcaggcatcatatttattgtcctgcagaaagttgaaaagactttgctcagacaacaggtggagctgtataggctgctcagccggaacacgtacttagaatgggaggacagtgtactgggtcgccatatcttctggagaaggcttcggaaggccttgctggatgggaaatcctggaatccggagggaaccgtgggcacaggctgtaactggcaggaagctacttctatttga

SEQ ID NO: 76720 - RNA, 189 nt, synthetic construct
  misc_feature 1..189: note = O00206
  source 1..189: mol_type = other RNA
atggccctgatcgtgctcggcggggtcgctggacttctgttgttcattggtttaggcatatttttctgcgttagatgtaggcaccggcgccgacaggcagaacgtatgagccaaatcaagagactgctatccgagaaaaagacctgccagtgtccccataggtttcagaaaacatgctctcctatttga

SEQ ID NO: 76721 - RNA, 84 nt, synthetic construct
  misc_feature 1..84: note = P01730
  source 1..84: mol_type = other RNA
atcctgctcggcaaggccaccctttacgctgtgctggtcagcgcattggttttaatggccatggtgaaaagaaaggacttctga

SEQ ID NO: 76722 - RNA, 246 nt, synthetic construct
  misc_feature 1..246: note = P01850
  source 1..246: mol_type = other RNA
gtgatgagcgtcgccaccatcgttattgtggacatatgcatcacaggcgggctgctccttctggtatactattggtccaagaacagaaaagctaaggcaaaacccgtgactaggggagccggtgcgggcgggcggcagcgcggacaaaataaggagcgacctccaccggtccccaaccctgattacgaaccaattcgtaaaggccagagagacttgtattctggtttaaatcagaggcggatctga

SEQ ID NO: 76723 - RNA, 2190 nt, synthetic construct
  misc_feature 1..2190: note = P07766
  source 1..2190: mol_type = other RNA
gccctgatcgctttcctcgcatttcttattatagtgaccagcatcgccctgttggtcgttttatacaagatttatgacctgcacaaaaagagatcctgcaacctagatgagcagcaagaactcgtggagagggacgatgaaaaacagctgatgaatgtagagcccatccatgcggacattcttctggaaacatacaagcggaaaatcgctgatgagggccgcttgttcctcgccgagtttcagtctatacctcgagtgttctcaaagtttccaatcaaggaagcacgtaaaccgttcaaccagaataagaacagatatgtcgacattctgccctacgattataatagggtggagctgagtgaaatcaacggggacgccggaagcaattacattaacgcttcctatatcgatggttttaaagagcctcggaagtacatagcagcccaaggcccacgcgacgagactgttgatgacttctggagaatgatttgggaacagaaagctacggtgatcgtcatggtgaccaggtgtgaggaagggaatcggaacaagtgcgccgagtactggccctctatggaagagggaacacgcgcgtttggcgatgtagttgtgaagattaatcagcacaaacgatgtcctgactatatcatccagaagctcaacattgtcaataaaaaggagaaagcaactggtagagaagtgacccatatacaattcacatcgtggccagaccacggggtgcccgaggatcctcatttactgcttaagttgaggcggcgtgtcaacgccttttcaaatttctttagcggaccaatcgttgtgcactgcagtgctggcgtaggccgcaccgggacttacattggaatcgacgccatgctggaaggtctagaggcagaaaacaaagtggatgtctatggctacgtggttaagctcagaaggcagcggtgtctgatggtgcaggtcgaggctcagtatatacttattcaccaagccctggtggagtacaaccagttcggggaaacagaggtaaatttgtccgaactccatccgtatctgcacaacatgaagaaacgagatcccccttctgagccaagccccttagaagcggagttccagcgcctgccttcctacagatcatggaggacccaacatatcggaaatcaggaggaaaacaagagtaaaaatcggaacagcaatgttatcccatacgactataaccgcgtgcccctcaagcacgagcttgaaatgtctaaagagtccgagcacgactcagatgaaagcagtgacgatgactctgattccgaggaaccgagcaagtacattaatgcctcgtttatcatgtcttattggaagcctgaggtcatgattgcagctcagggccccctgaaagaaacgataggtgacttctggcagatgatctttcaaagaaaggtgaaagtcattgtgatgttgactgagctaaagcatggggaccaggagatctgcgcccagtactggggagaaggcaaacagacctatggcgatatcgaggttgacctgaaggatacagacaagtcctcaacttacaccctcagggtgttcgaactgcgtcacagtaaacggaaggatagccgaacagtatatcaataccagtacaccaactggtccgtcgagcagcttccagctgaacctaaagagctgatttctatgatacaggtggttaagcaaaaattgccccagaagaatagctcagaggggaacaagcatcacaaaagtacgccactcctgatccattgtagagacggatcccagcagactggtatcttttgcgccttactgaatctactcgaaagcgcagagacagaagaggtggtcgatattttccaagtggtaaaggccctgaggaaagctcgccccggcatggtgtctacctttgaacagtatcagttcctttacgacgttattgcgtcaacttatcctgcacaaaacgggcaggtcaagaaaaataaccaccaggaggataagatcgagtttgacaacgaagtggataaagtgaagcaggacgccaattgtgtcaacccattgggagctccggagaagctgcccgaagccaaagagcaagcagagggcagtgaacctacaagcggtaccgaggggccagaacactccgttaatggccccgcctctcctgctctcaaccagggatcgtga

SEQ ID NO: 76724 - RNA, 141 nt, synthetic construct
  misc_feature 1..141: note = P08575
  source 1..141: mol_type = other RNA
gtgagcttctgcctggtcatggttctcctttttgccgtggacaccggcctgtacttctccgtaaagacaaacatcagatcttcaactagggattggaaagaccacaagtttaaatggcggaaggatccccaggacaaatga

SEQ ID NO: 76725 - RNA, 207 nt, synthetic construct
  misc_feature 1..207: note = P08637
  source 1..207: mol_type = other RNA
ttctgggtgctggtcgttgtgggcggggtactcgcctgctacagccttctggtgaccgtcgcttttatcattttctgggtgagatccaagaggtctcggttgttacactcagactatatgaacatgacaccccgccgacctggaccaactcgtaaacattaccagccgtatgcaccccctagagattttgccgcgtacaggagttga

SEQ ID NO: 76726 - RNA, 252 nt, synthetic construct
  misc_feature 1..252: note = P10747
  source 1..252: mol_type = other RNA
atcattaccgcagagggcataatcctcctgttctgcgctgtggtccccgggacacttctgttgtttagaaagaggtggcagaacgaaaaattaggactggacgccggtgatgagtacgaagacgagaatctatatgaaggcctcaacctggatgactgtagcatgtacgaggatatttcccgggggcttcaaggaacttatcaggacgttggctctctgaatatcggtgatgtgcagttggagaagccttga

SEQ ID NO: 76727 - RNA, 798 nt, synthetic construct
  misc_feature 1..798: note = P11912
  source 1..798: mol_type = other RNA
gtgagcgccgtcaccctggcttacctcatcttctgcctttgttccctggttggcattttgcacttacagagagcactggtgctaaggcggaagcgcaaacgaatgacagaccccactcgtagatttttcaaggtaacgcctccaccggggtctggaccccaaaaccagtatggtaatgtgctctcactgcctaccccaacaagtggccttgggagggcccagcggtgggcggctggactgggcggtactgcccccagctacgggaacccttcctctgatgtccaggcagacggagccttgggctcgcgctcaccacccggcgtggggcctgaggaagaggaaggagagggttatgaggaaccagatagcgaggaagacagtgagttttacgaaaatgattccaacctcggccaagaccagctgtctcaggatgggagcggatatgagaatccggaggacgaacccctgggccctgaggatgaagactccttctcaaacgctgagagttacgaaaatgaggatgaggaactcacccagccagttgcaagaacaatggactttttaagcccccatggttctgcctgggatccttccagggaggctacctcactggggagccaaagttatgaagacatgcggggaatactttacgccgcgccacagttgcgctctatccgaggccagcccggcccgaaccacgaggaagacgcagattcctacgagaatatggacaaccctgatgggcccgacccagcctggggaggtggcgggagaatgggaacttggagcacaaggtga

SEQ ID NO: 76728 - RNA, 189 nt, synthetic construct
  misc_feature 1..189: note = P15391
  source 1..189: mol_type = other RNA
ttcctgctctggatccttgccgctgtgagctccggcctgtttttctactcttttctattaaccgcagtctcactgagtaagatgttgaaaaagagaagccccctcacaactggggtttatgtgaaaatgcctccaacggagccggaatgcgagaagcagttccaaccctactttattcctataaactga

SEQ ID NO: 76729 - RNA, 219 nt, synthetic construct
  misc_feature 1..219: note = P16410
  source 1..219: mol_type = other RNA
atgggctggatcagagggaggcggagccgccactcctgggagatgtctgagttccataactacaatctggacctcaagaaatcagattttagtacccgatggcagaagcaacgttgccccgtggtcaaaagcaagtgtagagaaaacgcctcccctttctttttctgctgttttattgctgttgcaatgggaataaggttcatcattatggtggcctga

SEQ ID NO: 76730 - RNA, 192 nt, synthetic construct
  misc_feature 1..192: note = P16671
  source 1..192: mol_type = other RNA
ctgtgctacatcctcgacgccattcttttcctgtatggcatagtgttgaccttactgtactgtagactaaagatccaggtcaggaaagctgcaattacaagctatgagaagtccgatggggtttacactggactctctacgcggaaccaagaaacctatgagacactgaaacacgaaaagccccctcagtga

SEQ ID NO: 76731 - RNA, 213 nt, synthetic construct
  misc_feature 1..213: note = P26718
  source 1..213: mol_type = other RNA
ggcatcattatgatacagaccctgctcatcattcttttcatcattgtgcccatctttctgttgttagacaaggatgacagcaaagccgggatggaggaagatcacacatacgagggactggacatagatcaaactgctacgtatgaagacatcgtcaccctaagaacaggtgaggttaagtggtccgtgggcgaacatcctgggcaggagtga

SEQ ID NO: 76732 - RNA, 249 nt, synthetic construct
  misc_feature 1..249: note = P30273
  source 1..249: mol_type = other RNA
tggatcaccgccgtgctgcccacagtcattatatgcgttatggtgttctgtctcatcctttggaagtggaaaaagaaaaagagacctaggaacagctacaaatgcggcactaatacgatggagcgggaagagtccgaacagaccaagaagcgcgagaaaattcacatcccagaacgatctgacgaggctcaacgtgtatttaagtcaagtaaaacaagctcctgtgataagtctgacacttgcttctga

SEQ ID NO: 76733 - RNA, 249 nt, synthetic construct
  misc_feature 1..249: note = P32248
  source 1..249: mol_type = other RNA
ggcgggaccgtgctgctccttctgttcgtcatcagcattacaactataatcgttatctttttgaacagaaggcggcgccgagagcgtagagacttattcacggaatcctgggatacccagaaggcccccaataactacaggtctcctatttcaacaagtcaaccaactaatcagagcatggacgatacccgggaggacatttatgtgaactacccgacattttcccgcagacccaaaaccagggtatga

SEQ ID NO: 76734 - RNA, 303 nt, synthetic construct
  misc_feature 1..303: note = P40259
  source 1..303: mol_type = other RNA
ctggtgggcgccggggtcgttctcatgcttatcattctggtggctttgttaatgctggtattcagaagcaagagggaggtgaaacggcagaagtaccgcctatcccaactctataaatggcaggaagaggactctggacccgcacctggtacctttcagaacataggcttcgatatctgccaggacgatgactcaattcacctggaaagtatctacagcaattttcaaccatcccttcgacatattgatccggagacaaagatccgtatacagagaccccaggtcatgactacgtctttctga

SEQ ID NO: 76735 - RNA, 177 nt, synthetic construct
  misc_feature 1..177: note = P42081
  source 1..177: mol_type = other RNA
atgagcgactccaaggagcccagactgcagcaactcggccttctggaagaggaacagttgagggggttaggattccggcagacccgcggttacaaatctctggccggctgcctagggcacggacctctcgtgctgcagcttctgtcatttacattgctcgctggcctgctggtctga

SEQ ID NO: 76736 - RNA, 645 nt, synthetic construct
  misc_feature 1..645: note = Q15762
  source 1..645: mol_type = other RNA
gccgtgatcctgttctttttcacctttttcattacaactatggtcatgctcgctgcacttgcccaccatctgttttactgggacgtttggttcatatataacgtgtgcttggcgaaggtaaaaggctaccgcagcttatccacgtctcagaccttttatgatgcttacatctcatatgacacaaaggatgccagtgtgactgactgggtcattaatgagctgaggtaccacctagaagagagccgggataaaaacgtgctcctgtgtcttgaagagagagactgggatcccgggctggcaatcattgacaatttgatgcaatccatcaaccagtctaagaaaaccgttttcgtgctcacaaagaagtatgccaaatcgtggaattttaagaccgctttctacctggcactgcagcgactcatggatgaaaacatggacgtcataatctttattttactggagcctgtgcttcagcattcacaatacttgcgtctgagacagaggatctgcaaaagcagtattctacagtggccagataatccgaaggccgagggactcttctggcagactctgcggaacgtagttcttacagaaaatgactcccgctataacaatatgtacgtggattctatcaaacaatattga

SEQ ID NO: 76737 - RNA, 102 nt, synthetic construct
  misc_feature 1..102: note = Q685J3
  source 1..102: mol_type = other RNA
ctgctcggccttatcgagatgattctgttgagcgtgggggtcgttatgttcgtggcctttatgatatcctactgcgcttgtagatctaagaccatcaaatga

SEQ ID NO: 76738 - RNA, 120 nt, synthetic construct
  misc_feature 1..120: note = Q9NNX6
  source 1..120: mol_type = other RNA
gacagatacgtggccatcgtccaggctgttagcgcacacaggcatcgggcccgcgtgctgctcatttccaagctgtcttgcgtaggcatatggatccttgcgaccgtgttgtcaatttga

SEQ ID NO: 76739 - RNA, 129 nt, synthetic construct
  misc_feature 1..129: note = Q9NR97
  source 1..129: mol_type = other RNA
agaaccctgctccaggccaggaacttcgagcggaataaggctatcaaagtgattatagcagtcgttgtggtatttatcgtgttccaacttccctacaacggcgtcgtgctggcccagacagttgcgtga

SEQ ID NO: 76740 - RNA, 105 nt, synthetic construct
  misc_feature 1..105: note = A0A5B9
  source 1..105: mol_type = other RNA
accatcctgtacgagatcctgctgggcaaggccaccctgtacgccgtgctggtgagcgccctggtgctgatggccatggtgaagagaaaggacagcagaggctga

SEQ ID NO: 76741 - RNA, 75 nt, synthetic construct
  misc_feature 1..75: note = B7Z8K6
  source 1..75: mol_type = other RNA
ctgggcctgagaatgctgttcgccaagaccgtggccgtgaacttcctgctgaccgccaagctgttcttcctgtga

SEQ ID NO: 76742 - RNA, 627 nt, synthetic construct
  misc_feature 1..627: note = B9A064
  source 1..627: mol_type = other RNA
accatcatcggcgtgagcgtgctgagcgtgctggtggtgagcgtggtggccgtgctggtgtacaagttctacttccacctgatgctgctggccggctgcatcaagtacggcagaggcgagaacatctacgacgccttcgtgatctacagcagccaggacgaggactgggtgagaaacgagctggtgaagaacctggaggagggcgtgccccccttccagctgtgcctgcactacagagacttcatccccggcgtggccatcgccgccaacatcatccacgagggcttccacaagagcagaaaggtgatcgtggtggtgagccagcacttcatccagagcagatggtgcatcttcgagtacgagatcgcccagacctggcagttcctgagcagcagagccggcatcatcttcatcgtgctgcagaaggtggagaagaccctgctgagacagcaggtggagctgtacagactgctgagcagaaacacctacctggagtgggaggacagcgtgctgggcagacacatcttctggagaagactgagaaaggccctgctggacggcaagagctggaaccccgagggcaccgtgggcaccggctgcaactggcaggaggccaccagcatctga

SEQ ID NO: 76743 - RNA, 189 nt, synthetic construct
  misc_feature 1..189: note = O00206
  source 1..189: mol_type = other RNA
atggccctgatcgtgctgggcggcgtggccggcctgctgctgttcatcggcctgggcatcttcttctgcgtgagatgcagacacagaagaagacaggccgagagaatgagccagatcaagagactgctgagcgagaagaagacctgccagtgcccccacagattccagaagacctgcagccccatctga

SEQ ID NO: 76744 - RNA, 84 nt, synthetic construct
  misc_feature 1..84: note = P01730
  source 1..84: mol_type = other RNA
atcctgctgggcaaggccaccctgtacgccgtgctggtgagcgccctggtgctgatggccatggtgaagagaaaggacttctga

SEQ ID NO: 76745 - RNA, 246 nt, synthetic construct
  misc_feature 1..246: note = P01850
  source 1..246: mol_type = other RNA
gtgatgagcgtggccaccatcgtgatcgtggacatctgcatcaccggcggcctgctgctgctggtgtactactggagcaagaacagaaaggccaaggccaagcccgtgaccagaggcgccggcgccggcggcagacagagaggccagaacaaggagagacccccccccgtgcccaaccccgactacgagcccatcagaaagggccagagagacctgtacagcggcctgaaccagagaagaatctga

SEQ ID NO: 76746 - RNA, 2190 nt, synthetic construct
  misc_feature 1..2190: note = P07766
  source 1..2190: mol_type = other RNA
gccctgatcgccttcctggccttcctgatcatcgtgaccagcatcgccctgctggtggtgctgtacaagatctacgacctgcacaagaagagaagctgcaacctggacgagcagcaggagctggtggagagagacgacgagaagcagctgatgaacgtggagcccatccacgccgacatcctgctggagacctacaagagaaagatcgccgacgagggcagactgttcctggccgagttccagagcatccccagagtgttcagcaagttccccatcaaggaggccagaaagcccttcaaccagaacaagaacagatacgtggacatcctgccctacgactacaacagagtggagctgagcgagatcaacggcgacgccggcagcaactacatcaacgccagctacatcgacggcttcaaggagcccagaaagtacatcgccgcccagggccccagagacgagaccgtggacgacttctggagaatgatctgggagcagaaggccaccgtgatcgtgatggtgaccagatgcgaggagggcaacagaaacaagtgcgccgagtactggcccagcatggaggagggcaccagagccttcggcgacgtggtggtgaagatcaaccagcacaagagatgccccgactacatcatccagaagctgaacatcgtgaacaagaaggagaaggccaccggcagagaggtgacccacatccagttcaccagctggcccgaccacggcgtgcccgaggacccccacctgctgctgaagctgagaagaagagtgaacgccttcagcaacttcttcagcggccccatcgtggtgcactgcagcgccggcgtgggcagaaccggcacctacatcggcatcgacgccatgctggagggcctggaggccgagaacaaggtggacgtgtacggctacgtggtgaagctgagaagacagagatgcctgatggtgcaggtggaggcccagtacatcctgatccaccaggccctggtggagtacaaccagttcggcgagaccgaggtgaacctgagcgagctgcacccctacctgcacaacatgaagaagagagacccccccagcgagcccagccccctggaggccgagttccagagactgcccagctacagaagctggagaacccagcacatcggcaaccaggaggagaacaagagcaagaacagaaacagcaacgtgatcccctacgactacaacagagtgcccctgaagcacgagctggagatgagcaaggagagcgagcacgacagcgacgagagcagcgacgacgacagcgacagcgaggagcccagcaagtacatcaacgccagcttcatcatgagctactggaagcccgaggtgatgatcgccgcccagggccccctgaaggagaccatcggcgacttctggcagatgatcttccagagaaaggtgaaggtgatcgtgatgctgaccgagctgaagcacggcgaccaggagatctgcgcccagtactggggcgagggcaagcagacctacggcgacatcgaggtggacctgaaggacaccgacaagagcagcacctacaccctgagagtgttcgagctgagacacagcaagagaaaggacagcagaaccgtgtaccagtaccagtacaccaactggagcgtggagcagctgcccgccgagcccaaggagctgatcagcatgatccaggtggtgaagcagaagctgccccagaagaacagcagcgagggcaacaagcaccacaagagcacccccctgctgatccactgcagagacggcagccagcagaccggcatcttctgcgccctgctgaacctgctggagagcgccgagaccgaggaggtggtggacatcttccaggtggtgaaggccctgagaaaggccagacccggcatggtgagcaccttcgagcagtaccagttcctgtacgacgtgatcgccagcacctaccccgcccagaacggccaggtgaagaagaacaaccaccaggaggacaagatcgagttcgacaacgaggtggacaaggtgaagcaggacgccaactgcgtgaaccccctgggcgcccccgagaagctgcccgaggccaaggagcaggccgagggcagcgagcccaccagcggcaccgagggccccgagcacagcgtgaacggccccgccagccccgccctgaaccagggcagctga

SEQ ID NO: 76747 - RNA, 141 nt, synthetic construct
  misc_feature 1..141: note = P08575
  source 1..141: mol_type = other RNA
gtgagcttctgcctggtgatggtgctgctgttcgccgtggacaccggcctgtacttcagcgtgaagaccaacatcagaagcagcaccagagactggaaggaccacaagttcaagtggagaaaggacccccaggacaagtga

SEQ ID NO: 76748 - RNA, 207 nt, synthetic construct
  misc_feature 1..207: note = P08637
  source 1..207: mol_type = other RNA
ttctgggtgctggtggtggtgggcggcgtgctggcctgctacagcctgctggtgaccgtggccttcatcatcttctgggtgagaagcaagagaagcagactgctgcacagcgactacatgaacatgacccccagaagacccggccccaccagaaagcactaccagccctacgccccccccagagacttcgccgcctacagaagctga

SEQ ID NO: 76749 - RNA, 252 nt, synthetic construct
  misc_feature 1..252: note = P10747
  source 1..252: mol_type = other RNA
atcatcaccgccgagggcatcatcctgctgttctgcgccgtggtgcccggcaccctgctgctgttcagaaagagatggcagaacgagaagctgggcctggacgccggcgacgagtacgaggacgagaacctgtacgagggcctgaacctggacgactgcagcatgtacgaggacatcagcagaggcctgcagggcacctaccaggacgtgggcagcctgaacatcggcgacgtgcagctggagaagccctga

SEQ ID NO: 76750 - RNA, 798 nt, synthetic construct
  misc_feature 1..798: note = P11912
  source 1..798: mol_type = other RNA
gtgagcgccgtgaccctggcctacctgatcttctgcctgtgcagcctggtgggcatcctgcacctgcagagagccctggtgctgagaagaaagagaaagagaatgaccgaccccaccagaagattcttcaaggtgacccccccccccggcagcggcccccagaaccagtacggcaacgtgctgagcctgcccacccccaccagcggcctgggcagagcccagagatgggccgccggcctgggcggcaccgcccccagctacggcaaccccagcagcgacgtgcaggccgacggcgccctgggcagcagaagcccccccggcgtgggccccgaggaggaggagggcgagggctacgaggagcccgacagcgaggaggacagcgagttctacgagaacgacagcaacctgggccaggaccagctgagccaggacggcagcggctacgagaaccccgaggacgagcccctgggccccgaggacgaggacagcttcagcaacgccgagagctacgagaacgaggacgaggagctgacccagcccgtggccagaaccatggacttcctgagcccccacggcagcgcctgggaccccagcagagaggccaccagcctgggcagccagagctacgaggacatgagaggcatcctgtacgccgccccccagctgagaagcatcagaggccagcccggccccaaccacgaggaggacgccgacagctacgagaacatggacaaccccgacggccccgaccccgcctggggcggcggcggcagaatgggcacctggagcaccagatga

SEQ ID NO: 76751 - RNA, 189 nt, synthetic construct
  misc_feature 1..189: note = P15391
  source 1..189: mol_type = other RNA
ttcctgctgtggatcctggccgccgtgagcagcggcctgttcttctacagcttcctgctgaccgccgtgagcctgagcaagatgctgaagaagagaagccccctgaccaccggcgtgtacgtgaagatgccccccaccgagcccgagtgcgagaagcagttccagccctacttcatccccatcaactga

SEQ ID NO: 76752 - RNA, 219 nt, synthetic construct
  misc_feature 1..219: note = P16410
  source 1..219: mol_type = other RNA
atgggctggatcagaggcagaagaagcagacacagctgggagatgagcgagttccacaactacaacctggacctgaagaagagcgacttcagcaccagatggcagaagcagagatgccccgtggtgaagagcaagtgcagagagaacgccagccccttcttcttctgctgcttcatcgccgtggccatgggcatcagattcatcatcatggtggcctga

SEQ ID NO: 76753 - RNA, 192 nt, synthetic construct
  misc_feature 1..192: note = P16671
  source 1..192: mol_type = other RNA
ctgtgctacatcctggacgccatcctgttcctgtacggcatcgtgctgaccctgctgtactgcagactgaagatccaggtgagaaaggccgccatcaccagctacgagaagagcgacggcgtgtacaccggcctgagcaccagaaaccaggagacctacgagaccctgaagcacgagaagcccccccagtga

SEQ ID NO: 76754 - RNA, 213 nt, synthetic construct
  misc_feature 1..213: note = P26718
  source 1..213: mol_type = other RNA
ggcatcatcatgatccagaccctgctgatcatcctgttcatcatcgtgcccatcttcctgctgctggacaaggacgacagcaaggccggcatggaggaggaccacacctacgagggcctggacatcgaccagaccgccacctacgaggacatcgtgaccctgagaaccggcgaggtgaagtggagcgtgggcgagcaccccggccaggagtga

SEQ ID NO: 76755 - RNA, 249 nt, synthetic construct
  misc_feature 1..249: note = P30273
  source 1..249: mol_type = other RNA
tggatcaccgccgtgctgcccaccgtgatcatctgcgtgatggtgttctgcctgatcctgtggaagtggaagaagaagaagagacccagaaacagctacaagtgcggcaccaacaccatggagagagaggagagcgagcagaccaagaagagagagaagatccacatccccgagagaagcgacgaggcccagagagtgttcaagagcagcaagaccagcagctgcgacaagagcgacacctgcttctga

SEQ ID NO: 76756 - RNA, 249 nt, synthetic construct
  misc_feature 1..249: note = P32248
  source 1..249: mol_type = other RNA
ggcggcaccgtgctgctgctgctgttcgtgatcagcatcaccaccatcatcgtgatcttcctgaacagaagaagaagaagagagagaagagacctgttcaccgagagctgggacacccagaaggcccccaacaactacagaagccccatcagcaccagccagcccaccaaccagagcatggacgacaccagagaggacatctacgtgaactaccccaccttcagcagaagacccaagaccagagtgtga

SEQ ID NO: 76757 - RNA, 303 nt, synthetic construct
  misc_feature 1..303: note = P40259
  source 1..303: mol_type = other RNA
ctggtgggcgccggcgtggtgctgatgctgatcatcctggtggccctgctgatgctggtgttcagaagcaagagagaggtgaagagacagaagtacagactgagccagctgtacaagtggcaggaggaggacagcggccccgcccccggcaccttccagaacatcggcttcgacatctgccaggacgacgacagcatccacctggagagcatctacagcaacttccagcccagcctgagacacatcgaccccgagaccaagatcagaatccagagaccccaggtgatgaccaccagcttctga

SEQ ID NO: 76758 - RNA, 177 nt, synthetic construct
  misc_feature 1..177: note = P42081
  source 1..177: mol_type = other RNA
atgagcgacagcaaggagcccagactgcagcagctgggcctgctggaggaggagcagctgagaggcctgggcttcagacagaccagaggctacaagagcctggccggctgcctgggccacggccccctggtgctgcagctgctgagcttcaccctgctggccggcctgctggtgtga

SEQ ID NO: 76759 - RNA, 645 nt, synthetic construct
  misc_feature 1..645: note = Q15762
  source 1..645: mol_type = other RNA
gccgtgatcctgttcttcttcaccttcttcatcaccaccatggtgatgctggccgccctggcccaccacctgttctactgggacgtgtggttcatctacaacgtgtgcctggccaaggtgaagggctacagaagcctgagcaccagccagaccttctacgacgcctacatcagctacgacaccaaggacgccagcgtgaccgactgggtgatcaacgagctgagataccacctggaggagagcagagacaagaacgtgctgctgtgcctggaggagagagactgggaccccggcctggccatcatcgacaacctgatgcagagcatcaaccagagcaagaagaccgtgttcgtgctgaccaagaagtacgccaagagctggaacttcaagaccgccttctacctggccctgcagagactgatggacgagaacatggacgtgatcatcttcatcctgctggagcccgtgctgcagcacagccagtacctgagactgagacagagaatctgcaagagcagcatcctgcagtggcccgacaaccccaaggccgagggcctgttctggcagaccctgagaaacgtggtgctgaccgagaacgacagcagatacaacaacatgtacgtggacagcatcaagcagtactga

SEQ ID NO: 76760 - RNA, 102 nt, synthetic construct
  misc_feature 1..102: note = Q685J3
  source 1..102: mol_type = other RNA
ctgctgggcctgatcgagatgatcctgctgagcgtgggcgtggtgatgttcgtggccttcatgatcagctactgcgcctgcagaagcaagaccatcaagtga

SEQ ID NO: 76761 - RNA, 120 nt, synthetic construct
  misc_feature 1..120: note = Q9NNX6
  source 1..120: mol_type = other RNA
gacagatacgtggccatcgtgcaggccgtgagcgcccacagacacagagccagagtgctgctgatcagcaagctgagctgcgtgggcatctggatcctggccaccgtgctgagcatctga

SEQ ID NO: 76762 - RNA, 129 nt, synthetic construct
  misc_feature 1..129: note = Q9NR97
  source 1..129: mol_type = other RNA
agaaccctgctgcaggccagaaacttcgagagaaacaaggccatcaaggtgatcatcgccgtggtggtggtgttcatcgtgttccagctgccctacaacggcgtggtgctggcccagaccgtggcctga

SEQ ID NO: 76763 - RNA, 105 nt, synthetic construct
  misc_feature 1..105: note = A0A5B9
  source 1..105: mol_type = other RNA
accatcctgtacgagattctcctgggcaaggccacactttatgctgtgctggtcagcgccctcgttctgatggcgatggtgaaaagaaaggactcccgggggtga

SEQ ID NO: 76764 - RNA, 75 nt, synthetic construct
  misc_feature 1..75: note = B7Z8K6
  source 1..75: mol_type = other RNA
ctgggcctcagaatgctgttcgccaagaccgtggctgtcaactttcttctgacagccaaactcttctttctgtga

SEQ ID NO: 76765 - RNA, 627 nt, synthetic construct
  misc_feature 1..627: note = B9A064
  source 1..627: mol_type = other RNA
accatcattggcgtgagcgtcctgtccgttctcgtggtgtctgtcgtggccgttctggtgtacaagttctattttcaccttatgctgctcgctgggtgcatcaaatacggaagaggcgagaacatttatgacgccttcgtcatctacagctcccaggatgaagactgggtgcggaatgagctggttaagaaccttgaagagggggtgcccccttttcaactgtgtctccattatcgcgatttcattccgggagtcgcgatcgctgccaatatcattcacgaaggctttcataaatctagaaaggtgatcgtggtcgttagccagcacttcattcagtcccggtggtgcatctttgagtacgagattgcccagacatggcaattcctgtctagccgcgctgggatcatttttatcgtgctgcagaaagtggaaaagacgctcctgagacagcaggtcgagctttatcggctgctctcccgcaacacctacctggaatgggaggacagcgtgcttggaagacatatcttctggcggcgcctgagaaaggccctcctggatggcaaatcttggaatcccgagggcacagttgggaccggatgtaactggcaagaagctacatccatttga

SEQ ID NO: 76766 - RNA, 189 nt, synthetic construct
  misc_feature 1..189: note = O00206
  source 1..189: mol_type = other RNA
atggccctgatcgtgctcggcggggtcgctggactgcttctgttcattggcctcgggatctttttctgcgttagatgtcggcaccgcagacggcaggccgaacgcatgagccaaattaagagactgctttccgagaaaaagacctgccagtgtccccatcggtttcagaaaacatgctctcctatctga

SEQ ID NO: 76767 - RNA, 84 nt, synthetic construct
  misc_feature 1..84: note = P01730
  source 1..84: mol_type = other RNA
atcctgctcggcaaggccaccctgtacgctgtgcttgtcagcgccctggttctcatggcgatggtgaaaagaaaggacttctga

SEQ ID NO: 76768 - RNA, 246 nt, synthetic construct
  misc_feature 1..246: note = P01850
  source 1..246: mol_type = other RNA
gtgatgagcgtcgccaccatcgttattgtggacatctgcattacaggcgggctgctcctgcttgtgtactattggtccaagaacagaaaagctaaggccaaacccgtcacgcggggagcgggcgctgggggacgccagagaggccaaaataaggagcggcctccgcccgtgcctaaccccgattacgaacctatccgcaaagggcagagagacctgtattctggactcaatcagcggcgcatttga

SEQ ID NO: 76769 - RNA, 2190 nt, synthetic construct
  misc_feature 1..2190: note = P07766
  source 1..2190: mol_type = other RNA
gccctgatcgctttcctcgcctttctgattatcgtgaccagcattgcgcttctggtcgttctctacaagatctatgacctgcacaaaaagagatcctgcaaccttgatgagcagcaagaactggtggagcgggacgatgaaaaacagctcatgaatgtggagcccattcatgctgacatcctgctggaaacatacaagcgcaaaatcgccgatgagggcagactcttcctggccgagtttcagtctattcctcgggtcttcagcaagtttccgatcaaggaagctcgcaaacccttcaaccagaataagaacagatatgtggacattcttccttacgattataatcgggttgagctgtccgaaatcaacggggacgccggatctaattacattaacgctagctatatcgatggctttaaagagccccgcaagtacattgccgcgcaagggcctagagacgagacggtggatgacttctggcggatgatctgggaacagaaagccaccgtcatcgtgatggttacacgctgtgaggaaggaaatagaaacaagtgcgctgagtactggccctccatggaagagggcacccgggcctttggggatgtggtcgtgaagattaatcagcacaaacgctgtcctgactatatcattcagaagctcaacatcgtgaataaaaaggagaaagctacaggaagagaagtcacccatattcaattcacatcttggccggaccacggcgttcccgaggatcctcatctgcttctgaagctccggcgcagagtgaacgcctttagcaatttcttttccggccccatcgtggtccactgcagcgcgggggtgggacggaccggcacgtacatcgggattgacgccatgctggaaggactggaggctgaaaacaaagttgatgtgtatggctacgtcgtgaagctcagacgccagcggtgtctgatggttcaggtggaggcccagtatatccttattcaccaagctctggtcgagtacaaccagttcggggaaaccgaggtgaatctctctgaactgcatccttatcttcacaacatgaagaaaagagatcccccgtccgagcctagccccctggaagccgagttccagcgcctcccttcttaccggtcctggagaacacaacatatcggaaatcaggaggaaaacaagagcaaaaatcgcaactctaatgtcattccctacgactataaccgggtgcccctgaagcacgagctggaaatgtccaaagagagcgagcacgactccgatgaatctagcgacgatgactccgatagcgaggaaccttctaagtacatcaatgcctcctttatcatgagctattggaagccggaggttatgattgctgcgcagggccccctcaaagaaaccatcggcgacttctggcagatgatttttcaaagaaaggtgaaagtcatcgtgatgctgacagagcttaagcatggggaccaggagatttgcgcccagtactggggagaaggcaaacagacctatggggatatcgaggttgacctgaaggatacggacaagtctagcacatacaccctccgcgtgttcgaactgcggcactccaaaagaaaggattctcgcacagtctatcaataccagtacaccaactggagcgtggagcagcttcctgctgaacccaaagagctgatttccatgatccaggtggttaagcaaaaactccctcagaagaatagctctgagggaaacaagcatcacaaatccacacccctgctgatccattgtcgggacggcagccagcagaccgggatcttttgcgccctcctgaatcttctggaatctgccgagacggaagaggtcgtggatattttccaagtggtcaaggctctcagaaaagcccggccgggaatggtgtccacctttgaacagtatcagttcctgtacgacgttattgcgagcacatatcctgctcaaaacggccaggtgaagaaaaataaccaccaggaggataagatcgagtttgacaacgaagtcgataaagtgaagcaggacgccaattgtgttaaccccctgggcgcccctgagaaacttcccgaagctaaggagcaagccgaggggtccgaacctacctctggaacagagggccccgaacacagcgtgaatgggccggcttcccctgccctcaaccagggatcttga

SEQ ID NO: 76770 - RNA, 141 nt, synthetic construct
  misc_feature 1..141: note = P08575
  source 1..141: mol_type = other RNA
gtgagcttctgcctggtcatggttctcctgtttgccgtggacaccggcctttacttctccgtgaagacaaacatcagatctagcacgcgggattggaaagaccacaagtttaaatggcgcaaggatccccaggacaaatga

SEQ ID NO: 76771 - RNA, 207 nt, synthetic construct
  misc_feature 1..207: note = P08637
  source 1..207: mol_type = other RNA
ttctgggtgctggtcgttgtgggcggggtgctcgcctgctacagcctgcttgtcaccgtggcttttatcattttctgggttagatccaagcggtctcgcctgctccacagcgactatatgaacatgacacccagacggcctggaccgacgcgcaaacattaccagccctatgcccctcccagagattttgcggcttaccggtcctga

SEQ ID NO: 76772 - RNA, 252 nt, synthetic construct
  misc_feature 1..252: note = P10747
  source 1..252: mol_type = other RNA
atcattaccgccgagggcatcattctcctgttctgcgctgtggtccccgggacactgcttctgtttagaaagcggtggcagaacgaaaaactcggactggacgccggcgatgagtacgaagacgagaatctttatgaagggctgaacctcgatgactgtagcatgtacgaggatatctcccgcggactgcaaggcacgtatcaggacgttgggtctctgaatattggagatgtgcagctcgagaagccttga

SEQ ID NO: 76773 - RNA, 798 nt, synthetic construct
  misc_feature 1..798: note = P11912
  source 1..798: mol_type = other RNA
gtgagcgccgtcaccctggcttacctcatcttctgcctgtgttcccttgttggcattctgcacctccagagagccctggtgcttcggcgcaagagaaaacggatgacagaccccacgcgcagatttttcaaggtgacccctccgcccgggtctggacctcaaaaccagtatggcaatgtcctgagcctccccacacctacctccgggctgggacgggcgcagcgctgggctgccggcctcgggggaacagccccctcttacggcaaccctagctccgatgtgcaggctgacggcgccctggggtctagaagcccgcccggagttggccctgaggaagaggaaggggagggatatgaggaacccgattccgaggaagacagcgagttttacgaaaatgattctaacctgggccaagaccagctttcccaggatgggagcggatatgagaatcctgaggacgaacccctgggcccggaggatgaagactctttctccaacgctgagagctacgaaaatgaggatgaggaactcacccagcctgtggcccggacaatggactttctgtctccccatggctccgcgtgggatcctagccgcgaggccacctcccttgggtctcaaagctatgaagacatgagaggaatcctgtacgctgctccccagctccggtccattcgcggccagcccgggcctaaccacgaggaagacgccgatagctacgagaatatggacaacccggatggacccgaccctgcctggggcgggggaggcagaatgggcacgtggtctacccggtga

SEQ ID NO: 76774 - RNA, 189 nt, synthetic construct
  misc_feature 1..189: note = P15391
  source 1..189: mol_type = other RNA
ttcctgctctggatcctggccgctgtgagctccggcctgtttttctactcttttcttctcaccgccgtcagcctgtccaagatgcttaaaaagagatctcccctgacaacgggggtttatgtgaaaatgcctccgaccgagcccgaatgcgagaagcagttccaaccttactttattcccatcaactga

SEQ ID NO: 76775 - RNA, 219 nt, synthetic construct
  misc_feature 1..219: note = P16410
  source 1..219: mol_type = other RNA
atgggctggatcagagggcggcgcagcagacactcctgggagatgtctgagttccataactacaatctggacctcaagaaaagcgatttttccacccggtggcagaagcaacgctgccccgtggtcaaatctaagtgtagagaaaacgccagccctttctttttctgctgttttattgctgttgccatgggaatccggttcattatcatggtggcgtga

SEQ ID NO: 76776 - RNA, 192 nt, synthetic construct
  misc_feature 1..192: note = P16671
  source 1..192: mol_type = other RNA
ctgtgctacatcctcgacgccattctgttcctttatggcatcgtgctgaccctcctgtactgtagacttaagattcaggtccggaaagctgccatcacaagctatgagaagtccgatggggtttacacgggactgtctacccgcaaccaagaaacatatgagaccctcaaacacgaaaagccccctcagtga

SEQ ID NO: 76777 - RNA, 213 nt, synthetic construct
  misc_feature 1..213: note = P26718
  source 1..213: mol_type = other RNA
ggcatcattatgatccagaccctgctcattatcctgttcattatcgtgcccatctttcttctgctcgacaaggatgacagcaaagccgggatggaggaagatcacacatacgagggactggacattgatcaaacggctacctatgaagacatcgtcacacttagaaccggcgaggttaagtggtccgtgggggaacatcctggacaggagtga

SEQ ID NO: 76778 - RNA, 249 nt, synthetic construct
  misc_feature 1..249: note = P30273
  source 1..249: mol_type = other RNA
tggatcaccgccgtgctgcccacagtcattatctgcgttatggtgttctgtctcattctgtggaagtggaaaaagaaaaagagacctcggaacagctacaaatgcggcacgaataccatggagcgcgaagagtccgaacagacaaagaagagagagaaaatccacattccggaacggtctgacgaggctcaacgcgtgtttaagagctccaaaacctctagctgtgataagtccgacacatgcttctga

SEQ ID NO: 76779 - RNA, 249 nt, synthetic construct
  misc_feature 1..249: note = P32248
  source 1..249: mol_type = other RNA
ggcgggaccgtgctgctcctgcttttcgtcatcagcattacaacgatcattgttatctttctgaacagacggcgcagacgggagcgcagagacctcttcaccgaatcctgggatacacagaaggcccccaataactaccggtctcctattagcacctcccaaccgacaaatcagtctatggacgatacccgcgaggacatctatgtgaactaccccacatttagcagacggcctaaaacccgcgtgtga

SEQ ID NO: 76780 - RNA, 303 nt, synthetic construct
  misc_feature 1..303: note = P40259
  source 1..303: mol_type = other RNA
ctggtgggcgccggggtcgttctcatgctgatcattcttgtggctctgctcatgctggtgttcagaagcaagcgggaggtcaaacgccagaagtacagactttcccaactgtataaatggcaggaagaggactctggacccgcccctggcacctttcagaacatcgggttcgatatttgccaggacgatgacagcatccacctcgaatccatttactctaattttcaaccgagcctgcggcatatcgatcccgagacaaagatccgcattcagagacctcaggtgatgacgacctccttctga

SEQ ID NO: 76781 - RNA, 177 nt, synthetic construct
  misc_feature 1..177: note = P42081
  source 1..177: mol_type = other RNA
atgagcgactccaaggagcccagactgcagcaactcggcctgcttgaagaggaacagctgcgggggctcggattccgccagaccagaggctacaaatctctggccgggtgccttggacacggccctctggtgctccagctgctgagctttacactcctggctgggcttctggtctga

SEQ ID NO: 76782 - RNA, 645 nt, synthetic construct
  misc_feature 1..645: note = Q15762
  source 1..645: mol_type = other RNA
gccgtgatcctgttctttttcacctttttcattacaacgatggtcatgctcgctgccctggcgcaccatctgttttactgggacgtttggttcatctataacgtgtgccttgctaaggtgaaaggctacagaagcctctccacctctcagacattttatgatgcctacattagctatgacaccaaggatgcctccgtcacagactgggtgatcaatgagctgcggtaccaccttgaagagtctcgcgataaaaacgttctgctctgtctggaagagagagactgggatcccgggctggctattatcgacaatctcatgcaaagcatcaaccagtccaagaaaaccgtgttcgtcctgacaaagaagtatgccaaatcttggaattttaagaccgctttctaccttgccctgcagcggctcatggatgaaaacatggacgtgattatctttattctgcttgagcctgttctgcagcatagccaatacctccgcctgagacagcggatctgcaaatccagcattctgcagtggccggataatcccaaggcggagggactcttctggcagacgctgcgcaacgtggtccttaccgaaaatgactctagatataacaatatgtacgtggattccatcaaacaatattga

SEQ ID NO: 76783 - RNA, 102 nt, synthetic construct
  misc_feature 1..102: note = Q685J3
  source 1..102: mol_type = other RNA
ctgctcggcctgatcgagatgattcttctgagcgtgggggtcgttatgttcgtggcctttatgatctcctactgcgcttgtagatctaagaccattaaatga

SEQ ID NO: 76784 - RNA, 120 nt, synthetic construct
  misc_feature 1..120: note = Q9NNX6
  source 1..120: mol_type = other RNA
gacagatacgtggccatcgtccaggctgttagcgcccaccggcatcgcgcgagagtgctgctcatttccaagctgtcttgcgtgggcatctggattcttgctaccgtcctgagcatctga

SEQ ID NO: 76785 - RNA, 129 nt, synthetic construct
  misc_feature 1..129: note = Q9NR97
  source 1..129: mol_type = other RNA
agaaccctgctccaggcccggaacttcgagcgcaataaggctatcaaagtgattatcgccgtcgttgtggtgtttattgtcttccaactgccctacaacggcgtggttcttgcgcagacagtggcttga

SEQ ID NO: 76786 - RNA, 105 nt, synthetic construct
  misc_feature 1..105: note = A0A5B9
  source 1..105: mol_type = other RNA
acaatactatacgaaatactactaggaaaagcaacactatatgcagtactagtaagcgcactagtactaatggcaatggtaaaaagaaaagactcaagaggatga

SEQ ID NO: 76787 - RNA, 75 nt, synthetic construct
  misc_feature 1..75: note = B7Z8K6
  source 1..75: mol_type = other RNA
cttggccttcgcatgctctttgccaaaactgttgccgttaattttctcttaactgctaaattattctttctttga

SEQ ID NO: 76788 - RNA, 627 nt, synthetic construct
  misc_feature 1..627: note = B9A064
  source 1..627: mol_type = other RNA
acaataataggagtatcagtattatcagtactagtagtaagtgtagtagcagtactagtatacaaattctacttccacttaatgttactagcaggatgcataaaatatggaagaggagaaaacatatacgacgcattcgtaatatactcatcacaagacgaagattgggtaagaaacgaattagtaaaaaacttagaagaaggagtaccaccattccaattatgtctacattaccgagacttcataccaggagtagcaatagcagcaaacataatacacgaaggattccacaaaagccgaaaagtaatagtagtagtatcacaacacttcatacaaagcagatggtgcatattcgaatacgaaatagcacagacatggcaattcctatcatcaagagcaggaataatattcatagtactacaaaaagtagaaaaaacattactaagacaacaagtagaactatacaggttactatcaagaaacacatacctagaatgggaagactcagtactaggaagacacatattctggagaagactaagaaaagcactattagacggaaaatcatggaacccagaaggaacagtaggaacaggatgcaactggcaagaagcaacatcaatatga

SEQ ID NO: 76789 - RNA, 189 nt, synthetic construct
  misc_feature 1..189: note = O00206
  source 1..189: mol_type = other RNA
atggcactaatagtattaggaggagtagcaggactactattattcataggactaggaatattcttctgcgtaagatgcagacacagaagaagacaagcagaaagaatgagccaaataaaaagactactatcagaaaaaaaaacatgccaatgcccacacagattccaaaaaacatgctcaccaatatga

SEQ ID NO: 76790 - RNA, 84 nt, synthetic construct
  misc_feature 1..84: note = P01730
  source 1..84: mol_type = other RNA
atactattaggaaaagcaacactatatgcagtactagtaagcgcactagtactaatggcaatggtaaaaagaaaagacttttga

SEQ ID NO: 76791 - RNA, 246 nt, synthetic construct
  misc_feature 1..246: note = P01850
  source 1..246: mol_type = other RNA
gtaatgagcgtagcaacaatagtaatagtagacatatgcataacaggaggactactactactagtatactactggtcaaaaaacagaaaagcaaaagcaaaaccagtaacaagaggagcaggagcaggaggaagacaaagaggacaaaacaaagaaagaccaccaccagtaccaaacccagactacgaaccaataagaaaaggacaaagagacctatactcaggactaaaccaaagaagaatatga

SEQ ID NO: 76792 - RNA, 2190 nt, synthetic construct
  misc_feature 1..2190: note = P07766
  source 1..2190: mol_type = other RNA
gcactaatcgcatttttagcattccttataatagttacaagtatagcattattagtcgtactctataaaatctacgatctacataagaaaagatcatgcaacttagacgaacaacaagagctagtagaaagagacgatgaaaaacaattaatgaacgtagaaccaatacacgcggatatcctactagaaacctacaaaagaaaaatagcagatgaaggaagattattcctagcagaatttcaaagcataccaagagtatttagtaaattcccaatcaaagaagctagaaaaccattcaatcaaaataaaaaccgatacgtagacatcctaccttatgattacaatagagtagaactctctgaaattaatggcgatgcaggatcaaattacataaacgcatcatacatagacggattcaaagaacctcgtaaatacatagcagctcaaggccccagagatgaaacagtggacgacttctggagaatgatatgggaacaaaaagcaacagtcatagtcatggtaacaagatgcgaggaaggaaacagaaataaatgcgcagaatactggccatccatggaagaaggaactcgtgccttcggagacgtagtagtaaaaataaatcaacacaaacgatgcccagattacataatccaaaaattaaatatcgtcaataagaaagaaaaagcaacaggacgcgaagtaactcatatccaattcacaagttggccagaccacggcgtaccagaagacccacacctattactcaaactaagaagaagagtaaatgcatttagcaacttcttcagcggaccaattgtagttcactgtagtgccggtgtaggccgtacagggacatacatagggatagacgcaatgttagaaggattagaggcagaaaacaaagtagacgtttacggttatgttgtaaaactaagaagacaacgatgcttaatggtccaagtagaagcccaatacatcctaatacatcaagctctagtcgagtataaccaattcggcgaaacagaagtcaacttatctgaattgcacccatatttacacaatatgaagaaaagggatccaccttccgaaccatctccattagaagcagagttccaacgactaccaagttacagaagctggagaacacaacacataggaaaccaagaagaaaacaaaagtaaaaatcggaatagcaatgtaataccttacgattataaccgagtgcctttaaaacatgaattagaaatgagtaaagaaagcgaacacgactcggacgaaagctcagacgacgactcagatagcgaagaaccatccaaatatataaatgcatcatttattatgagttactggaaaccagaagtaatgatagcagctcaaggccccctaaaagaaacaataggagacttctggcaaatgatatttcaaagaaaagttaaagtaatagtcatgctaacagaattaaaacacggtgaccaagaaatatgtgcacaatactggggtgaaggaaaacaaacatacggagacatagaagtagacctaaaagatacggacaaatcttccacttacactcttagagtgtttgaactaagacactcaaaaagaaaagacagtagaacagtataccaataccaatatacaaactggagcgtagaacaactaccggcagaacccaaagaactaatttcaatgatacaagtcgtaaaacaaaaattaccacagaaaaactccagtgaaggaaataaacaccataaatcaacccctctattaatacactgtagagatggcagccaacaaacaggaatattttgcgcactgctaaacttattagaaagcgcagaaacagaagaagtagtagatatattccaagtcgtaaaagcactaagaaaagcgagaccaggtatggtatctacattcgaacaataccaatttctatacgatgtaatagccagcacataccccgctcaaaacggtcaagtaaagaaaaataaccatcaagaggataaaatcgaatttgataacgaagtagacaaagtcaaacaggatgctaactgcgttaacccattaggtgcacccgaaaaattaccagaagcaaaagaacaagccgaaggatcagaaccgacctcaggtactgaaggcccagaacactccgtaaacggaccagccagtccagcactaaaccaaggatcatga

SEQ ID NO: 76793 - RNA, 141 nt, synthetic construct
  misc_feature 1..141: note = P08575
  source 1..141: mol_type = other RNA
gtatcattttgcctagtaatggtattactatttgcagtagacacaggattatacttcagcgtaaaaacaaacataagaagcagcacaagagactggaaagaccataaatttaaatggagaaaagacccacaagataaatga

SEQ ID NO: 76794 - RNA, 207 nt, synthetic construct
  misc_feature 1..207: note = P08637
  source 1..207: mol_type = other RNA
ttctgggtattagtagtagtaggaggagtactagcatgctatagcctattagtaacagtagcatttataatattctgggtaagaagcaaaagatcaagattactacatagcgattacatgaacatgacaccaagaagaccaggaccaacaagaaaacactatcaaccatacgcaccaccaagagatttcgcagcatatagatcatga

SEQ ID NO: 76795 - RNA, 252 nt, synthetic construct
  misc_feature 1..252: note = P10747
  source 1..252: mol_type = other RNA
ataataacagcagaaggaataatattactattctgcgcagtagtaccaggaacattactattattcagaaaaagatggcaaaacgaaaaattaggactagacgcaggagacgaatatgaagacgaaaatctatatgaaggactaaatctagatgactgtagtatgtacgaagacataagcagaggactacaaggaacatatcaagacgtaggaagcctaaacataggagacgtacaactagaaaaaccatga

SEQ ID NO: 76796 - RNA, 798 nt, synthetic construct
  misc_feature 1..798: note = P11912
  source 1..798: mol_type = other RNA
gtaagtgcagtaacattagcatatctaatattttgtctatgttcattagtaggaattttacatttacaaagagctttagtactaagaagaaaaagaaaaagaatgacagatccaacaagaagattttttaaagtaactccacctccaggatcaggaccacagaatcaatatggaaatgttttgagtttaccaacaccaacaagcggattaggaagagcacaaagatgggcagctggattaggaggaacagcaccatcatatggaaatccatcaagcgatgtacaagctgatggagcattaggaagcagaagcccaccaggagtaggaccagaagaagaagaaggagaaggatatgaagaaccagattcagaagaagattcagaattttatgaaaatgatagtaatctaggacaagatcaattaagccaagatggatcaggatatgaaaatccagaagatgaaccattaggaccagaagatgaagattcatttagcaatgcagaaagttatgaaaatgaagatgaagaattaacacaaccagtagcaagaacaatggattttttaagcccacatggctcagcatgggatcctagtagagaagcaacatcattaggaagccagagttatgaagatatgagaggaatattatatgcagcaccccaattaagatcaataagagggcaaccaggaccaaatcatgaagaagatgcagattcatatgaaaatatggataacccagatggacctgatccagcatggggaggaggaggaagaatgggaacatggtcaacaagatga

SEQ ID NO: 76797 - RNA, 189 nt, synthetic construct
  misc_feature 1..189: note = P15391
  source 1..189: mol_type = other RNA
ttcctcctatggatactcgcagccgtatcctcaggcctattcttctactcattcctactcacagccgtatccctatccaaaatgctaaaaaaacgctcacccctaaccacaggcgtatacgtaaaaatgcccccaaccgaacccgaatgcgaaaaacaattccaaccctacttcatacccataaactga

SEQ ID NO: 76798 - RNA, 219 nt, synthetic construct
  misc_feature 1..219: note = P16410
  source 1..219: mol_type = other RNA
atgggatggataagaggaagaagaagcagacactcatgggaaatgtcagaatttcacaattacaatttagatttaaaaaaatcagacttcagcacaagatggcaaaaacaaagatgcccagtagtaaaatcaaaatgcagagaaaacgcaagcccattctttttctgctgttttatagcagtagcaatgggaataagattcataataatggtagcatga

SEQ ID NO: 76799 - RNA, 192 nt, synthetic construct
  misc_feature 1..192: note = P16671
  source 1..192: mol_type = other RNA
ctatgctacatactagacgcaatactattcctatacggaatagtactaacactactatactgcagactaaaaatacaagtaagaaaagcagcaataacaagctacgaaaaaagcgacggagtatacacaggactaagcacaagaaaccaagaaacatacgaaacactaaaacacgaaaaaccaccacaatga

SEQ ID NO: 76800 - RNA, 213 nt, synthetic construct
  misc_feature 1..213: note = P26718
  source 1..213: mol_type = other RNA
ggaataataatgatacaaacactactaataatactattcataatagtaccaatattcctactactagacaaagacgactcaaaagcaggaatggaagaagaccacacatacgaaggactagacatagaccaaacagcaacatacgaagacatagtaacactaagaacaggagaagtaaaatggtcagtaggagaacacccaggacaagaatga

SEQ ID NO: 76801 - RNA, 249 nt, synthetic construct
  misc_feature 1..249: note = P30273
  source 1..249: mol_type = other RNA
tggataacagcagtactaccaacagtaataatatgcgtaatggtattctgcctaatactatggaaatggaaaaaaaaaaaaagaccaagaaactcatacaaatgcggaacaaacacaatggaaagagaagaaagcgaacaaacaaaaaaaagagaaaaaatacacataccagaaagatcagacgaagcacaaagagtattcaaaagctcaaaaacaagctcatgcgacaaatcagacacatgcttctga

SEQ ID NO: 76802 - RNA, 249 nt, synthetic construct
  misc_feature 1..249: note = P32248
  source 1..249: mol_type = other RNA
ggaggaacagtactactactactattcgtaatatcaataacaacaataatagtaatattcctaaacagaagaagaagaagagaaagaagagacctattcacagaatcatgggacacacaaaaagcaccaaacaactacagatcaccaataagcacaagccaaccaacaaaccaaagcatggacgacacaagagaagacatatacgtaaactacccaacattcagcagaagaccaaaaacaagagtatga

SEQ ID NO: 76803 - RNA, 303 nt, synthetic construct
  misc_feature 1..303: note = P40259
  source 1..303: mol_type = other RNA
ctagtaggagcaggagtagtactaatgctaataatactagtagcactactaatgctagtattcagatcaaaaagagaagtaaaaagacaaaaatacagactaagccaactatacaaatggcaagaagaagactcaggaccagcaccaggaacattccaaaacataggattcgacatatgccaagacgacgactcaatacacctagaatcaatatactcaaacttccaaccatcactaagacacatagacccagaaacaaaaataagaatacaaagaccacaagtaatgacaacatcattctga

SEQ ID NO: 76804 - RNA, 177 nt, synthetic construct
  misc_feature 1..177: note = P42081
  source 1..177: mol_type = other RNA
atgagcgactcaaaagaaccaagactacaacaactaggactactagaagaagaacaattaagaggactaggattcagacaaacaagaggatacaaaagcctagcaggatgcctaggacacggaccattagtactacaactactatcatttacattactagcaggactattagtatga

SEQ ID NO: 76805 - RNA, 645 nt, synthetic construct
  misc_feature 1..645: note = Q15762
  source 1..645: mol_type = other RNA
gcagtaatactattcttcttcacattcttcataacaacaatggtaatgctagcagcactcgcccaccacctattctactgggatgtatggttcatatacaacgtatgcctagcaaaagtaaaaggatacagatcattatctacatcacaaacattctacgacgcatacatatcatacgacactaaagacgcatcagtaacagactgggtaataaatgaactcagataccacctagaagaatcaagagacaaaaacgtattactatgcctagaagaaagagactgggacccaggactagcaatcatagacaacctaatgcaatcaataaaccaatcaaaaaaaacagtatttgtactaacaaaaaaatacgccaaatcatggaacttcaaaaccgcattctacctagccctacaaagactaatggacgaaaacatggacgtaataatattcatactactagaaccagtattacaacactcacaatacctaagactacgacaaagaatatgcaaatcatccatactacaatggccagacaacccaaaagcagaaggcctattctggcaaacactcagaaacgtagtcctaacagaaaacgactcacgatacaacaacatgtacgtagactcaataaaacaatactga

SEQ ID NO: 76806 - RNA, 102 nt, synthetic construct
  misc_feature 1..102: note = Q685J3
  source 1..102: mol_type = other RNA
ctattaggattaatagaaatgatactattaagcgtaggagtagtaatgttcgtagcatttatgataagctattgcgcatgcagaagcaaaacaataaaatga

SEQ ID NO: 76807 - RNA, 120 nt, synthetic construct
  misc_feature 1..120: note = Q9NNX6
  source 1..120: mol_type = other RNA
gatagatatgtagcaatagtacaagcagtatcagcacatagacatagagcaagagtactattaatatcaaaattaagctgtgtaggaatatggatattagcaacagtattaagcatatga

SEQ ID NO: 76808 - RNA, 129 nt, synthetic construct
  misc_feature 1..129: note = Q9NR97
  source 1..129: mol_type = other RNA
agaacactattacaagcaagaaatttcgaaagaaataaagcaataaaagtaataatagcagtagtagtagtattcatagtatttcaactgccatataacggagtagtactagcacaaacagtagcatga

SEQ ID NO: 76809 - RNA, 105 nt, synthetic construct
  misc_feature 1..105: note = A0A5B9
  source 1..105: mol_type = other RNA
accatcctgtacgagattctcctgggcaaggccactttgtatgcagtgctggtcagcgccctcgtgctgatggcgatggtaaaaaggaaggactcccgggggtga

SEQ ID NO: 76810 - RNA, 75 nt, synthetic construct
  misc_feature 1..75: note = B7Z8K6
  source 1..75: mol_type = other RNA
ctgggcctcaggatgctgttcgccaagaccgtggcagtcaactttttgctgactgccaaactcttctttctgtga

SEQ ID NO: 76811 - RNA, 627 nt, synthetic construct
  misc_feature 1..627: note = B9A064
  source 1..627: mol_type = other RNA
accatcattggcgtgagcgtcctgtccgtgctcgtagtgagtgtcgtggccgtgctggtctacaagttctattttcacttgatgctgctcgcagggtgcatcaaatacggtaggggcgagaacatttatgacgccttcgtgatctacagctcccaggatgaagactgggtacggaatgagctggtgaagaacttggaagagggggtgcccccatttcaactgtgtctccattatcgcgatttcattccgggcgtggcgatcgccgcaaatatcattcacgaaggttttcataaaagtaggaaggtgatcgtcgtggtaagccagcacttcattcagtcccggtggtgcatctttgagtacgagattgcccagacttggcaattcctgagctcccgcgcagggatcatttttatcgtgctgcagaaagtcgaaaagaccctcctgaggcagcaggtcgagttgtatcggctgctcagtcgcaacacgtacctggaatgggaggacagcgtgctgggcaggcatatcttctggcggcgcttgaggaaggccctcctggatggcaaatcctggaatcccgaggggactgtcggtaccggctgtaactggcaagaagcgaccagcatttga

SEQ ID NO: 76812 - RNA, 189 nt, synthetic construct
  misc_feature 1..189: note = O00206
  source 1..189: mol_type = other RNA
atggccctgatcgtgctcggcggggtcgcaggtctgttgctgttcattggcctcgggatctttttctgcgtgaggtgtcggcaccgcaggcggcaggccgaacgcatgagccaaattaagaggctgttgtccgagaaaaagacctgccagtgtccccatcggtttcagaaaacttgcagtccaatctga

SEQ ID NO: 76813 - RNA, 84 nt, synthetic construct
  misc_feature 1..84: note = P01730
  source 1..84: mol_type = other RNA
atcctgctcggcaaggccaccctgtacgcagtgttggtcagcgccctggtgctcatggcgatggtaaaaaggaaggacttctga

SEQ ID NO: 76814 - RNA, 246 nt, synthetic construct
  misc_feature 1..246: note = P01850
  source 1..246: mol_type = other RNA
gtgatgagcgtcgccaccatcgtgattgtagacatctgcattactggcgggctgctcctgttggtgtactattggtccaagaacaggaaagcaaaggccaaacccgtcacccggggtgcgggcgccgggggccgccagaggggtcaaaataaggagcggccaccgcccgtgccaaaccccgattacgaaccaatccgcaaagggcagagggacctgtatagtggcctcaatcagcggcgcatttga

SEQ ID NO: 76815 - RNA, 2190 nt, synthetic construct
  misc_feature 1..2190: note = P07766
  source 1..2190: mol_type = other RNA
gccctgatcgcattcctcgcctttctgattatcgtgaccagcattgcgttgctggtcgtgctctacaagatctatgacctgcacaaaaagaggtcctgcaacttggatgagcagcaagaactggtagagcgggacgatgaaaaacagctcatgaatgtggagcccattcatgccgacatcctgctggaaacttacaagcgcaaaatcgcagatgagggcaggctctttctggccgagtttcagagtattccacgggtcttcagcaagtttccgatcaaggaagcacgcaaacccttcaaccagaataagaacaggtatgtggacattttgccatacgattataatcgggtggagctgtccgaaatcaacggggacgccggtagtaattacattaacgcgagctatatcgatggctttaaagagccccgcaagtacattgccgcacaagggccaagggacgagaccgtcgatgacttctggcggatgatctgggaacagaaagccacggtgatcgtaatggtgactcgctgtgaggaaggcaataggaacaagtgcgccgagtactggccctccatggaagagggtacccgggcatttggggatgtcgtggtgaaaattaatcagcacaagcgctgtccagactatatcattcagaagctcaacatcgtcaataaaaaggagaaagccaccggcagggaagtgactcatattcaattcaccagctggccggaccacggcgtacccgaggatccacatctgctgttgaagctccggcgcagggtgaacgcgttttccaatttcttcagtgggcccatcgtcgtgcactgcagcgccggtgtgggccggacggggacttacatcggcattgacgcaatgctggaaggtctggaggccgaaaacaaagtcgatgtgtatgggtacgtagtgaagctccgcaggcagcggtgtctgatggtccaggtggaggcacagtatatcttgattcaccaagccctggtcgagtacaaccagtttggcgaaaccgaggtgaatctctccgaactgcatccatatctgcacaacatgaagaaaagggatcccccgagcgagcccagtccattggaagccgagttccagcgcctcccctcctaccggagctggaggactcaacatatcggcaatcaggaggaaaacaagtccaaaaatcgcaacagtaatgtgattccatacgactataaccgggtacccctgaagcacgagctggaaatgagcaaagagtccgagcacgacagcgatgaaagttccgacgatgacagcgatagtgaggaaccatccaagtacatcaatgcgagctttatcatgagctattggaagccggaggtgatgattgcagcccaggggcccctcaaagaaaccatcggtgacttctggcagatgatttttcaaaggaaggtcaaagtgatcgtcatgctgaccgagttgaagcatggcgaccaggagatttgcgcccagtactggggcgaagggaaacagacgtatggtgatatcgaggtggacctgaaggatactgacaagtccagtacctacactctccgcgtgttcgaactgcggcacagcaaaaggaaggattcccggaccgtatatcaataccagtacaccaactggagcgtggagcagctgccagcagaacccaaagagttgattagtatgatccaggtcgtgaagcaaaaactcccacagaaaaattccagcgagggcaacaagcatcacaagtccactcccctgctgatccattgtcgcgacgggagtcagcagacgggcattttctgcgccctcctgaatttgctggaaagcgcggagaccgaagaggtcgtggatatcttccaagtggtaaaggccctcaggaaagcacggccggggatggtctccacttttgaacagtatcagttcctgtacgacgtgattgccagcacctatccagcacaaaacggtcaggtgaagaaaaataaccaccaggaggataagatcgagtttgacaacgaagtcgataaagtgaagcaggacgccaattgtgtgaaccccctgggcgcccccgagaagttgccagaagcaaaagagcaagccgaggggagtgaacccacctccggcactgagggtccagaacacagcgtaaatggcccggcgtcccccgccctgaaccaggggagttga

SEQ ID NO: 76816 - RNA, 141 nt, synthetic construct
  misc_feature 1..141: note = P08575
  source 1..141: mol_type = other RNA
gtgagcttctgcctggtcatggtgctcctgtttgccgtagacaccggcttgtacttctccgtgaagactaacatcaggagtagcacccgggattggaaagaccacaagtttaaatggcgcaaggatccccaggacaaatga

SEQ ID NO: 76817 - RNA, 207 nt, synthetic construct
  misc_feature 1..207: note = P08637
  source 1..207: mol_type = other RNA
ttctgggtgctggtcgtggtaggcggggtgctcgcctgctacagcctgttggtcaccgtggcatttatcattttctgggtgaggtccaagcggagtcgcctgctccacagcgactatatgaacatgactcccaggcggccaggtccgacccgcaaacattaccagccctatgccccacccagggattttgcggcctaccggtcctga

SEQ ID NO: 76818 - RNA, 252 nt, synthetic construct
  misc_feature 1..252: note = P10747
  source 1..252: mol_type = other RNA
atcattaccgccgagggcatcattctcctgttctgcgcagtggtccccgggactctgttgctgtttaggaagcggtggcagaacgaaaaactcggtctggacgccggcgatgagtacgaagacgagaatttgtatgaagggctgaacctcgatgactgtagcatgtacgaggatatctcccgcggcctgcaaggtacctatcaggacgtggggagtctgaatattggcgatgtacagctcgagaagccatga

SEQ ID NO: 76819 - RNA, 798 nt, synthetic construct
  misc_feature 1..798: note = P11912
  source 1..798: mol_type = other RNA
gtgagcgccgtcaccctggcatacctcatcttctgcctgtgttccttggtgggcattctgcacctccagagggccctggtattgcggcgcaagaggaaacggatgactgaccccacccgcaggtttttcaaggtgacgccaccgcccgggagtggtccacaaaaccagtatggcaatgtcctgagcctccccactccaacctccgggctgggccgggcgcagcgctgggccgcaggtctgggcgggaccgcccccagttacgggaacccaagctccgatgtgcaggcagacggggccctcggtagcaggtccccgcccggcgtggggccagaggaagaggaaggcgagggttatgaggaacccgatagtgaggaagacagcgagttttacgaaaatgattccaacctggggcaagaccagttgagccaggatggcagtggctatgagaatccagaggacgaacccctggggccggaggatgaagactccttcagcaacgcggagtcctacgaaaatgaggatgaggaactcactcagcccgtcgcccggaccatggactttctgagtccacatggtagcgcatgggatccctcccgcgaggccacgagcctgggcagtcaatcctatgaagacatgagggggatcttgtacgccgcaccacagctccggagcattcgcggccagcccggtccaaaccacgaggaagacgccgatagttacgagaatatggacaacccggatggccccgacccagcgtggggcggcgggggtaggatgggcacttggtccacccggtga

SEQ ID NO: 76820 - RNA, 189 nt, synthetic construct
  misc_feature 1..189: note = P15391
  source 1..189: mol_type = other RNA
ttcctgctctggatcctggccgcagtgagctccggcttgtttttctacagttttctgctcaccgccgtcagcctgtccaagatgttgaaaaagaggagtcccctgactaccggggtgtatgtaaaaatgccaccgacggagcccgaatgcgagaagcagttccaaccatactttattcccatcaactga

SEQ ID NO: 76821 - RNA, 219 nt, synthetic construct
  misc_feature 1..219: note = P16410
  source 1..219: mol_type = other RNA
atgggctggatcagggggcggcgcagcaggcactcctgggagatgagtgagttccataactacaatctggacctcaagaaaagcgatttttccacccggtggcagaagcaacgctgccccgtggtcaaaagtaagtgtagggaaaacgccagcccattctttttctgctgttttattgcagtggccatgggtatccggttcattatcatggtagcgtga

SEQ ID NO: 76822 - RNA, 192 nt, synthetic construct
  misc_feature 1..192: note = P16671
  source 1..192: mol_type = other RNA
ctgtgctacatcctcgacgccattctgttcttgtatggcatcgtgctgaccctcctgtactgtaggttgaagattcaggtccggaaagcagccatcactagctatgagaagtccgatggggtgtacaccggtctgagtacgcgcaaccaagaaacttatgagaccctcaaacacgaaaagcccccacagtga

SEQ ID NO: 76823 - RNA, 213 nt, synthetic construct
  misc_feature 1..213: note = P26718
  source 1..213: mol_type = other RNA
ggcatcattatgatccagaccctgctcattatcctgttcattatcgtgcccatctttttgctgctcgacaaggatgacagcaaagccgggatggaggaagatcacacttacgagggtctggacattgatcaaaccgcaacgtatgaagacatcgtcactttgaggaccggcgaggtgaagtggtccgtaggggaacatccaggccaggagtga

SEQ ID NO: 76824 - RNA, 249 nt, synthetic construct
  misc_feature 1..249: note = P30273
  source 1..249: mol_type = other RNA
tggatcaccgccgtgctgcccactgtcattatctgcgtgatggtattctgtctcattctgtggaagtggaaaaagaaaaagaggccacggaacagctacaaatgcggcaccaatacgatggagcgcgaagagtccgaacagactaagaagagggagaaaatccacattccggaacggagtgacgaggcacaacgcgtgtttaagagctccaaaaccagtagctgtgacaagtccgatacctgcttctga

SEQ ID NO: 76825 - RNA, 249 nt, synthetic construct
  misc_feature 1..249: note = P32248
  source 1..249: mol_type = other RNA
ggcgggaccgtgctgctcctgttgttcgtcatcagcattactaccatcattgtgatctttctgaacaggcggcgcaggcgggagcgcagggacctcttcacggaatcctgggatactcagaaggcccccaataactaccggagtccaattagcacctcccaaccgaccaatcagagtatggacgatactcgcgaggacatctatgtaaactaccccacctttagcaggcggccaaaaacgcgcgtgtga

SEQ ID NO: 76826 - RNA, 303 nt, synthetic construct
  misc_feature 1..303: note = P40259
  source 1..303: mol_type = other RNA
ctggtgggcgccggggtcgtgctcatgctgatcattttggtagcactgctcatgctggtgttcaggagcaagcgggaggtcaaacgccagaagtacaggttgtcccaactgtataaatggcaggaagaggacagtggtcccgccccaggcacctttcagaacatcgggttcgatatttgccaggacgatgacagcatccacctcgaatccatttacagtaattttcaaccgagcctgcggcatatcgatcccgagactaagatccgcattcagaggccacaggtgatgaccacgtccttctga

SEQ ID NO: 76827 - RNA, 177 nt, synthetic construct
  misc_feature 1..177: note = P42081
  source 1..177: mol_type = other RNA
atgagcgactccaaggagcccaggctgcagcaactcggcctgttggaagaggaacagctgcgggggctcggtttccgccagaccaggggctacaaaagtctggccgggtgcttgggccacggtccactggtgctccagctgctgagctttactctcctggcagggttgctggtctga

SEQ ID NO: 76828 - RNA, 645 nt, synthetic construct
  misc_feature 1..645: note = Q15762
  source 1..645: mol_type = other RNA
gccgtgatcctgttctttttcacctttttcattactaccatggtcatgctcgcagccctggcgcaccatttgttttactgggacgtgtggttcatctataacgtatgcctggccaaggtgaaaggctacaggagcctctccacgagtcagactttttatgatgcatacattagctatgacaccaaggatgcctccgtcaccgactgggtgatcaatgagctgcggtaccacttggaagagagtcgcgataaaaacgtgctgctctgtctggaagagagggactgggatcccgggctggcaattatcgacaatctcatgcaaagcatcaaccagtccaagaaaactgtcttcgtgctgaccaagaagtatgccaaaagctggaattttaagacggcgttctacttggccctgcagcggctcatggatgaaaacatggacgtaattatctttattctgctggagccagtgttgcagcattcccaatacctccgcctgaggcagcggatctgcaaaagtagcattctgcagtggccggataatcccaaggcagagggtctcttctggcagactctgcgcaacgtcgtgttgaccgaaaatgactccaggtataacaatatgtacgtggatagcatcaaacaatattga

SEQ ID NO: 76829 - RNA, 102 nt, synthetic construct
  misc_feature 1..102: note = Q685J3
  source 1..102: mol_type = other RNA
ctgctcggcctgatcgagatgattttgctgagcgtgggggtcgtgatgttcgtagcctttatgatctcctactgcgcatgtaggagtaagaccattaaatga

SEQ ID NO: 76830 - RNA, 120 nt, synthetic construct
  misc_feature 1..120: note = Q9NNX6
  source 1..120: mol_type = other RNA
gacaggtacgtggccatcgtccaggcagtgagcgcccaccggcatcgcgcgagggtactgctcatttccaagctgagttgcgtgggcatctggattttggccaccgtcctgagcatctga

SEQ ID NO: 76831 - RNA, 129 nt, synthetic construct
  misc_feature 1..129: note = Q9NR97
  source 1..129: mol_type = other RNA
aggaccctgctccaggcccggaacttcgagcgcaataaggcaatcaaagtgattatcgccgtcgtggtagtgtttattgtcttccaactgccctacaacggcgtggtgttggcgcagactgtcgcctga

SEQ ID NO: 76832 - RNA, 105 nt, synthetic construct
  misc_feature 1..105: note = A0A5B9
  source 1..105: mol_type = other RNA
accatcctctacgaaatcctactcggcaaagccacactctacgccgtcctcgtctccgccctcgtactcatggccatggtcaaacgcaaagactcacgcggctaa

SEQ ID NO: 76833 - RNA, 75 nt, synthetic construct
  misc_feature 1..75: note = B7Z8K6
  source 1..75: mol_type = other RNA
ctcggcctccgcatgctctttgccaaaaccgtcgccgtcaactttctcctaaccgccaaactattctttctctga

SEQ ID NO: 76834 - RNA, 627 nt, synthetic construct
  misc_feature 1..627: note = B9A064
  source 1..627: mol_type = other RNA
acaatcataggcgtatccgtactatccgtactagtcgtctcagtcgtcgcagtcctcgtttacaaattctacttccacctaatgctcctcgccggctgcatcaaatacggacgaggcgaaaacatctacgacgcattcgtcatctactcctcccaggacgaagactgggtccgcaacgaactcgttaaaaacctcgaagaaggcgtcccccccttccaactttgcctccactaccgagacttcatacccggcgtcgccatcgcagcaaacataatccacgaaggcttccacaaatctcgcaaagtcatcgtcgtagtctcacaacacttcatacaatcacgatggtgcatctttgaatacgaaatcgcacaaacctggcaattcctgtcctcacgcgcaggcatcatcttcatagtactccaaaaagtcgaaaaaaccctcctccgccaacaagtcgaactctaccgcctcctctcccgcaacacctacctagaatgggaagactccgtcctcggccgacacatcttctggcgccgactcaggaaagccctcctagacggcaaatcctggaaccccgaaggcaccgtaggtaccggctgcaactggcaagaagccacatcaatatga

SEQ ID NO: 76835 - RNA, 189 nt, synthetic construct
  misc_feature 1..189: note = O00206
  source 1..189: mol_type = other RNA
atggcactcatagtcctgggcggagtcgcaggcctactcctgttcataggcctaggcatattcttctgcgtacgctgccgccaccgcagacgccaggccgaacgcatgagccagatcaaacgactactctcagaaaagaaaacgtgccagtgcccacacagattccagaaaacgtgctcacccatatga

SEQ ID NO: 76836 - RNA, 84 nt, synthetic construct
  misc_feature 1..84: note = P01730
  source 1..84: mol_type = other RNA
atcctcctcggcaaagccaccctctacgccgtactcgtctccgccctcgtactcatggccatggtcaaacgcaaagacttctga

SEQ ID NO: 76837 - RNA, 246 nt, synthetic construct
  misc_feature 1..246: note = P01850
  source 1..246: mol_type = other RNA
gtcatgtcagtagccaccatcgtaatcgtcgacatatgcatcaccggcggcctcctcctcctcgtatactactggtcaaaaaaccgaaaagccaaagccaaacccgtaacccgaggcgcaggcgccggcggccgccaacgcggacaaaacaaagaacgcccaccacccgtccccaacccagactacgaacccatccgaaaaggacaacgcgacctctactcaggcctcaaccaacgccgaatctga

SEQ ID NO: 76838 - RNA, 2190 nt, synthetic construct
  misc_feature 1..2190: note = P07766
  source 1..2190: mol_type = other RNA
gccctaatcgcatttttggccttcctaatcatagtaaccagcatcgccttgctggtagtcctatacaaaatatacgacctccacaagaaacgtagctgcaatcttgacgaacaacaggagctagtcgaacgagacgacgaaaaacaactcatgaacgtcgaaccgatccatgccgacatcctcctagaaacgtacaaaagaaaaatcgccgacgaaggccgactattccttgcggagttccaatccatacccagagtcttctccaaattcccaatcaaagaagctagaaaacccttcaatcaaaacaaaaaccgctacgtcgacatactaccatacgactacaacagggtcgaattatctgaaatcaacggcgacgccggttccaactacatcaacgcatcgtacatagacggcttcaaagaaccccgcaaatacatagcagcccaaggacctcgagacgaaacggtagacgatttctggcgcatgatctgggaacaaaaagcgaccgtgatcgtcatggtcacgcgctgcgaagaaggcaaccgcaacaaatgcgccgaatactggccgagcatggaagagggcactcgcgccttcggagacgtagtagtaaaaattaaccaacacaaacgttgcccagactacataatacaaaaactcaacatcgtaaacaaaaaggagaaggctacaggacgcgaagtcacccacatacaattcacatcctggcccgaccacggcgtaccggaagacccacatctgctcctgaaactccggagacgtgtaaacgccttctccaacttctttagcggacccatagttgtccactgcagcgccggagtaggccgcaccggtacatacatcggcatcgacgcgatgctagaaggcctggaagcagaaaacaaagtcgacgtctatggatacgtcgtaaagttacgccgccaacgctgcctcatggtccaagtcgaggcccaatacatcctcatacaccaagcccttgtcgaatacaaccaattcggcgaaacagaggtcaacctctcagaactccacccctacctacacaacatgaagaaacgggacccacccagcgaaccctcacccctggaagccgagttccaacgcctcccaagctaccgctcctggcgcacccaacacatagggaaccaagaagagaacaaatccaaaaaccgcaattccaacgtcataccatacgactacaaccgagtcccactgaaacacgaactcgaaatgtccaaagagtcagaacacgacagcgacgaatcatccgacgacgacagcgactccgaagaacccagcaaatatatcaacgcatcattcataatgagctactggaaaccggaagtcatgatagccgcacaggggcccctaaaagaaaccatcggagacttttggcaaatgatattccaacgcaaggtcaaagtcatagtgatgttgaccgagcttaaacacggcgaccaagaaatctgcgcgcagtactggggagaaggtaagcaaacctacggcgacatcgaagtagatctcaaagacactgacaaaagctcaacctacacactacgagtattcgaattacggcactcaaaaagaaaagacagccgcacggtataccaataccaatacacaaactggagcgtcgagcaactcccggctgagccaaaagaactcatatccatgatccaagtagtcaaacaaaagctaccccagaaaaactccagcgaaggcaacaagcaccacaaatccacaccgctcctaatacattgcagggacggcagccaacagacaggcatcttctgcgccctccttaatctcctcgaaagcgccgaaaccgaagaagtagtagacatcttccaagtagtaaaagcactccgaaaagcccggccaggaatggtctcaacatttgaacaataccaattcctatacgacgtaatagcgagcacctacccggcacaaaacggccaagtgaagaaaaacaaccaccaagaagacaaaatcgagttcgataacgaagtcgacaaagtaaaacaggacgccaactgcgtcaaccccctaggagccccagaaaaactccccgaagcgaaagaacaagcagaaggatcagaaccaacgagcggtaccgagggcccagaacacagcgtaaacggcccggcctcgcccgcactaaaccaaggcagctga

SEQ ID NO: 76839 - RNA, 141 nt, synthetic construct
  misc_feature 1..141: note = P08575
  source 1..141: mol_type = other RNA
gtcagcttctgcttagtaatggtcctactcttcgccgtagacacgggcctgtacttcagcgtgaaaacaaacatacgctcgagcacacgcgactggaaggaccacaaattcaaatggcgcaaggacccgcaagacaaatga

SEQ ID NO: 76840 - RNA, 207 nt, synthetic construct
  misc_feature 1..207: note = P08637
  source 1..207: mol_type = other RNA
ttctgggtcctcgtcgtagtcggaggcgtcctcgcctgctattccctactcgtcaccgtcgccttcataatattctgggtcagatccaaacgctcacgcctactccactccgactacatgaacatgaccccacgcagacccggaccaacccgcaaacactaccaaccatacgcacccccacgcgacttcgcagcctaccgctcatga

SEQ ID NO: 76841 - RNA, 252 nt, synthetic construct
  misc_feature 1..252: note = P10747
  source 1..252: mol_type = other RNA
atcataaccgcagaaggcatcatcctcctattctgcgcagtcgtccccggcaccctcctactcttccgaaaacgctggcaaaacgaaaaactcggcctcgacgccggagacgaatacgaagacgaaaacctatacgaaggactcaacctagacgactgctcaatgtacgaagacatctcccgcggcctacaaggcacctaccaagacgtcggctcactcaacatcggcgacgtccaactagaaaaaccctga

SEQ ID NO: 76842 - RNA, 798 nt, synthetic construct
  misc_feature 1..798: note = P11912
  source 1..798: mol_type = other RNA
gtaagcgcagtcacactagcatacctcatattctgcctatgctcactcgtcggaatcctccacctccaacgagcactcgtgctcagacgcaagcgcaaacgaatgaccgaccccacacgccgattcttcaaagtcaccccaccccccggctcaggcccacaaaaccaatacggcaacgtcctaagcctacccacccccacgagcggactcggacgcgcacaaagatgggccgccggactcgggggcacagcaccatcctacggaaacccctcaagcgacgtacaagcagacggcgcactaggatcccgatccccccccggagtcggcccagaagaagaagaaggagaaggatacgaagaaccagactcagaagaagactccgaattctacgaaaacgactcaaacctcggccaagaccaactcagccaagacggaagcggctacgaaaacccagaagacgaacccctcggacccgaagacgaagactccttctccaacgcagaatcctacgaaaacgaagacgaagaactaacacaacccgtagccagaaccatggacttcctctcgccacacggctcagcctgggacccgagcagagaagccacatccctcggaagccaatcctacgaagacatgcgaggcatcctctacgccgccccacaactccgaagcatacgcggacaacccggccccaaccacgaagaagacgcagactcatacgaaaacatggacaacccagacggcccagaccccgcctggggaggaggcggccgcatgggcacatggtcgacccgatga

SEQ ID NO: 76843 - RNA, 189 nt, synthetic construct
  misc_feature 1..189: note = P15391
  source 1..189: mol_type = other RNA
ttcctcttatggatactcgccgccgtctcctccggcctattcttctactccttcctactcacagccgtatccctctccaaaatgctcaaaaaacgctcacccctcaccaccggcgtctacgtcaaaatgccccccaccgaacccgaatgcgaaaaacaattccaaccctacttcatacccatcaactga

SEQ ID NO: 76844 - RNA, 219 nt, synthetic construct
  misc_feature 1..219: note = P16410
  source 1..219: mol_type = other RNA
atggggtggatacgagggcgaaggagcaggcactcgtgggagatgtcggaatttcacaattacaatctcgatctcaagaaatcggactttagcacgagatggcaaaagcaaaggtgcccggtcgtgaaatcgaaatgtcgcgagaacgcgagcccgttctttttctgttgctttatcgcggtcgcgatggggatcaggttcataataatggtcgcgtga

SEQ ID NO: 76845 - RNA, 192 nt, synthetic construct
  misc_feature 1..192: note = P16671
  source 1..192: mol_type = other RNA
ctgtgctacatcctggacgcaatcctgttcttatacggaatcgtactcacactcctatactgccgcctgaaaatacaagtgcgcaaggccgcaatcacgagctacgagaaaagcgacggcgtatacacaggcctaagcacgcgcaatcaagaaacctacgaaacactcaaacacgagaaaccgccccaatga

SEQ ID NO: 76846 - RNA, 213 nt, synthetic construct
  misc_feature 1..213: note = P26718
  source 1..213: mol_type = other RNA
ggcatcatcatgatccaaaccctactaataatactattcatcatagtccccatattcctcctcctagacaaagacgactccaaagcaggcatggaagaagaccacacctacgaaggcctcgacatcgaccaaaccgcaacctacgaagacatcgtaaccctacgcaccggcgaagtcaaatggtccgtcggcgaacaccccggccaagaatga

SEQ ID NO: 76847 - RNA, 249 nt, synthetic construct
  misc_feature 1..249: note = P30273
  source 1..249: mol_type = other RNA
tggataaccgcggtcctgcccacagtcataatctgcgtcatggtcttctgcctgatattatggaagtggaagaaaaagaaaaggcccagaaactcgtacaaatgcgggaccaataccatggaaagagaagagagcgaacaaacgaaaaagcgcgagaaaatacacatacccgagcgctcggacgaggcccagcgcgtgttcaagagctcgaaaacgagctcatgcgataaatcggacacatgcttttga

SEQ ID NO: 76848 - RNA, 249 nt, synthetic construct
  misc_feature 1..249: note = P32248
  source 1..249: mol_type = other RNA
ggcggaaccgtcctcctactcctattcgtcatatccatcacaacaataatcgtcatattcctcaaccgcagacgccgccgagaacgccgagacctcttcaccgaatcatgggacacccaaaaagcccccaacaactaccgctcacccatctccacatcccaacccacaaaccaatccatggacgacacaagagaagacatctacgtcaactaccccaccttctcccgccgcccaaaaaccagagtctga

SEQ ID NO: 76849 - RNA, 303 nt, synthetic construct
  misc_feature 1..303: note = P40259
  source 1..303: mol_type = other RNA
ctagtcggcgccggcgtcgtcctcatgctaatcatcctcgtcgccctactcatgctcgtcttccgatccaaacgcgaagtcaaacgccaaaaataccgactatcccaactctacaaatggcaagaagaagactccggccccgcccccggcacattccaaaacataggcttcgacatctgccaagacgacgactccatacacctagaatccatctactccaacttccaaccctcactccgccacatagacccagaaacaaaaatccgcatccaacgcccacaagtcatgaccacctccttctga

SEQ ID NO: 76850 - RNA, 177 nt, synthetic construct
  misc_feature 1..177: note = P42081
  source 1..177: mol_type = other RNA
atgtccgactcaaaagaaccccgactccaacaactcggcctactcgaagaagaacaactccgcggcctcggcttccgccaaacccgcggctacaaatccctcgccggctgcctcggccacggccccctcgtcctccaactcctatccttcaccctactcgccggcctactcgtctga

SEQ ID NO: 76851 - RNA, 645 nt, synthetic construct
  misc_feature 1..645: note = Q15762
  source 1..645: mol_type = other RNA
gccgtcatcctctttttcttcacattcttcatcaccaccatggtaatgctcgccgccctagcccaccacttattctactgggacgtctggttcatctacaacgtatgcctagccaaagtcaaaggctaccgctccctctcaacctcccaaacattctacgacgcctacatatcctacgacacaaaagacgcttcagtaacagattgggtcatcaacgaactacgataccacctcgaagaatccagagataaaaacgtactcctctgcctcgaagaacgcgactgggaccccggcctcgcaatcatcgacaacctcatgcaatccatcaaccaatcaaaaaaaaccgtcttcgtcctcacaaaaaaatacgcaaaatcatggaacttcaaaacagccttctacctcgcactccaacgactcatggacgaaaacatggacgtcataatcttcatcctccttgaaccagtactccaacactcacaatacctgcgcctccgccaacgaatctgcaaatcatcaatcctccaatggccagacaaccccaaagccgaaggcctcttctggcaaaccctacgcaacgtcgtcctcactgaaaacgactcccgatacaataacatgtacgtcgactccatcaaacaatattga

SEQ ID NO: 76852 - RNA, 102 nt, synthetic construct
  misc_feature 1..102: note = Q685J3
  source 1..102: mol_type = other RNA
ctcttgggcttgatcgagatgatactcttgagcgtaggcgtggtcatgttcgtggcctttatgataagctattgcgcgtgcaggagcaagaccataaaatga

SEQ ID NO: 76853 - RNA, 120 nt, synthetic construct
  misc_feature 1..120: note = Q9NNX6
  source 1..120: mol_type = other RNA
gatcgctatgtcgcgatcgtgcaagcggtctcggcccatcgccatcgcgcgcgcgtgctcttgatctcgaaattgagctgtgtcgggatctggatcttggccacggtcttgagcatatga

SEQ ID NO: 76854 - RNA, 129 nt, synthetic construct
  misc_feature 1..129: note = Q9NR97
  source 1..129: mol_type = other RNA
cgcacactcttgcaagcgcgcaatttcgagcgcaataaagcgatcaaggtcataatcgcggtcgtggtcgtgttcatagtctttcaattgccatataacggggtcgtgctcgcgcaaacggtcgcgtga

SEQ ID NO: 76855 - RNA, 105 nt, synthetic construct
  misc_feature 1..105: note = A0A5B9
  source 1..105: mol_type = other RNA
accatactctacgaaatactcctgggcaaggccacactctatgccgtgctcgtgagcgcgctagtgctcatggccatggtcaaacgcaaggactcacgcgggtga

SEQ ID NO: 76856 - RNA, 75 nt, synthetic construct
  misc_feature 1..75: note = B7Z8K6
  source 1..75: mol_type = other RNA
ctcggcctacgcatgctctttgccaaaaccgtcgccgtcaactttctcctaaccgccaaactcttcttcctctga

SEQ ID NO: 76857 - RNA, 627 nt, synthetic construct
  misc_feature 1..627: note = B9A064
  source 1..627: mol_type = other RNA
accatcatcggcgtatccgtcctctcagtcctagtcgtatcagtcgtcgccgtcctcgtctacaaattctacttccacctaatgctactagccggctgcatcaaatacggccgcggcgaaaacatctacgacgccttcgtcatctactcctcacaagacgaagactgggtccgcaacgaactcgtcaaaaacctcgaagaaggcgtccccccattccaattatgcctccactaccgcgacttcatacccggagtcgccatcgccgctaacataatccacgaaggcttccacaaatcccgcaaagtcatcgtagtcgtcagccaacacttcatccaatcacgctggtgcatcttcgaatacgaaatagcccaaacctggcaattcctctcctcacgagccggaatcatcttcatcgtcctccaaaaagtcgaaaaaaccctcctccgccaacaagtcgaactctaccgcctcctatcccgcaacacctatctagaatgggaagactccgtcctaggccgccacatcttctggcgtcgactccgcaaagccctcctcgacggcaaatcctggaacccagaaggcacagtcggcaccggatgcaactggcaagaagccacctccatctga

SEQ ID NO: 76858 - RNA, 189 nt, synthetic construct
  misc_feature 1..189: note = O00206
  source 1..189: mol_type = other RNA
atggccctcatcgtcctcggcggcgtcgccggcctactcctcttcataggcctaggcatattcttctgcgtccgctgccgccaccgccgacgccaagccgaacgcatgtcccaaatcaaacgcctcctctccgaaaaaaaaacatgccaatgcccccaccgattccaaaaaacatgctcacccatatga

SEQ ID NO: 76859 - RNA, 84 nt, synthetic construct
  misc_feature 1..84: note = P01730
  source 1..84: mol_type = other RNA
atactcttgggcaaggccacgctctatgccgtgctagtgagcgcgctcgtgctcatggccatggtcaagcgcaaggacttttga

SEQ ID NO: 76860 - RNA, 246 nt, synthetic construct
  misc_feature 1..246: note = P01850
  source 1..246: mol_type = other RNA
gtcatgtccgtcgccaccatcgtaatcgtcgacatctgcatcaccggcggcctactcctcctcgtctactactggtccaaaaaccgcaaagccaaagccaaacccgtcacccgcggcgccggcgccggcggacgccaaagaggccaaaacaaagaaagacccccaccagtccccaacccagactacgaaccaatccgcaaaggccaacgcgacctatactccggcctaaaccaacgccgcatctga

SEQ ID NO: 76861 - RNA, 2190 nt, synthetic construct
  misc_feature 1..2190: note = P07766
  source 1..2190: mol_type = other RNA
gccctaatcgccttcctagccttccttataatcgtcacctccatagcactcctagtagtcctatacaaaatatacgacctccataagaaacgttcctgcaacctagatgaacaacaagaacttgtcgaaagagacgacgaaaaacaactcatgaacgtcgagccgatccacgcagatattcttctcgaaacctacaaacgcaaaatagccgacgaaggacgcttattcctagccgagttccaatcaatcccccgagtcttctccaaattccccataaaagaagcccgcaaacccttcaaccaaaacaaaaaccgatacgtagacattctaccctacgactataatcgcgttgaactctccgaaattaacggcgacgccggaagcaactacataaacgcctcatacatagacggcttcaaagaaccaagaaaatacatcgccgcacaaggccccagagacgaaacagtggacgacttctggcgaatgatatgggaacaaaaagccacagtcatcgtaatggtcacacggtgcgaagaaggaaaccgcaataaatgcgcagaatattggcccagcatggaagaaggaaccagagccttcggcgacgtcgtagtcaagatcaaccagcacaaaaggtgcccagactacatcatccaaaaactaaacatagtcaataagaaagaaaaagccaccggccgagaagtcacgcacatccaattcacgagctggcccgaccacggtgtcccagaagatccacacctactactcaaactccgacgcagagtcaacgcgttctccaacttcttctccggcccgatcgtcgttcattgctccgcgggagtcggccgtacaggcacctacatcggcatcgacgcaatgctcgaaggactggaagccgaaaataaagtagacgtatacggctacgtagtaaaactcaggcgccagcgctgcctgatggtccaagtggaagcgcaatacatactaatccaccaagccctcgtcgaatacaaccaattcggggaaacagaagttaacctgagcgaactccacccatacctccacaacatgaagaaacgcgacccacccagcgaaccctcacccctcgaagcagagttccagagattgccatcgtacagaagctggaggacccaacacataggaaaccaggaagagaacaaaagcaaaaaccgcaactcaaacgtcatcccctatgattacaaccgtgtccccctcaaacacgaactcgagatgtcaaaagagtccgagcacgactccgacgaaagctccgacgacgacagcgattcagaggagccaagcaaatacataaacgccagcttcatcatgagctactggaaaccagaagtaatgatcgcagcacaaggccccctaaaagagaccataggcgacttctggcaaatgatcttccagcgcaaagtgaaagtaatcgtgatgcttacagaactaaaacacggagaccaagaaatatgcgcccaatactggggcgaaggaaaacaaacctacggagacatcgaggtcgacctcaaagacaccgacaaatcctccacctacaccctccgagtcttcgaactacgacactccaagcgaaaagacagtcgcacagtttaccagtaccaatacaccaactggtccgtagaacaactccccgccgaacccaaagagcttatatccatgatccaggtcgtgaaacaaaaactccctcagaaaaacagcagtgagggaaacaagcaccacaaaagcacaccactcctcatacactgcagggacggttcccaacaaaccggcatcttctgcgccctgctcaatctactcgaaagcgctgaaacagaagaagtcgtagacatcttccaagtagtcaaggcactcagaaaagcccgaccaggaatggtctccaccttcgaacaataccaatttctctatgacgtcatcgcaagcacataccctgcccagaacgggcaagtcaagaaaaacaaccaccaagaagacaaaatagagttcgacaacgaagtagacaaagtaaaacaagacgccaactgcgtaaaccccctaggcgcaccagaaaagctccccgaagcaaaagaacaagccgaaggaagcgaaccaacatccggcaccgaaggcccagaacacagcgtaaacggccccgcctcccccgccctcaaccaaggcagctga

SEQ ID NO: 76862 - RNA, 141 nt, synthetic construct
  misc_feature 1..141: note = P08575
  source 1..141: mol_type = other RNA
gtgagcttctgcctggtcatggtcctcctgttcgccgtagacacaggcctgtacttcagcgtgaaaacgaacatacgctcaagcacgcgagactggaaagaccacaaattcaaatggcgcaaggacccgcaagacaaatga

SEQ ID NO: 76863 - RNA, 207 nt, synthetic construct
  misc_feature 1..207: note = P08637
  source 1..207: mol_type = other RNA
ttctgggtcctagtcgtagtcggcggcgtcctagcatgctactccctcctcgtaaccgtcgccttcatcatcttctgggtcagatccaaacgctcccgcctcctccactccgattacatgaacatgacaccccgcagacccggccccacccgaaaacactaccaaccctacgcacccccacgcgacttcgccgcctaccgatcctaa

SEQ ID NO: 76864 - RNA, 252 nt, synthetic construct
  misc_feature 1..252: note = P10747
  source 1..252: mol_type = other RNA
atcataaccgcggaaggaatcatactcttgttctgtgccgtggtaccgggcacgctcttgctctttcgcaagcgatggcaaaatgaaaagctcgggctcgatgccggggacgagtacgaggacgagaacttgtacgagggcttgaacttggacgattgctcgatgtatgaagatatctcgcgcgggctacagggcacgtaccaggacgtgggctcgctaaatatcggggacgtgcaattggaaaagccatag

SEQ ID NO: 76865 - RNA, 798 nt, synthetic construct
  misc_feature 1..798: note = P11912
  source 1..798: mol_type = other RNA
gtaagcgcggtcacactagcatacctgatcttctgcctgtgctcactcgtaggaatactccacctccagcgagcattggtgctaagacgcaagcgcaagcgcatgacagacccaacacgaagattcttcaaagtaaccccgcccccgggctcaggcccacaaaaccaatacggcaacgtactaagcctacccacaccaacgagcggactcggacgcgcacaaagatgggcagccgggctcggaggaacggccccgtcctacggcaacccatcaagcgacgtccaagccgacggcgcactcgggagcagaagcccacccggggtcgggcccgaagaagaagaaggggaagggtacgaggaaccagactcagaagaagactcagagttctacgaaaacgacagcaacctcgggcaagaccaactgagccaggacgggagcgggtacgaaaacccggaagacgaaccgctcggacccgaagacgaagactcattctcgaacgcagaatcgtacgaaaacgaggacgaagaactgacacaacccgtggccaggactatggacttcctctcaccacacggctcagcctgggacccaagcagagaagcaacctcactagggagccaaagctacgaagacatgaggggaatactctatgccgcgccccagctcagatccatacgcgggcaaccgggcccaaaccacgaagaagacgcagactcatacgaaaacatggacaacccagacggcccagacccagcatggggcgggggcggacgcatgggcacatggtcgaccagatga

SEQ ID NO: 76866 - RNA, 189 nt, synthetic construct
  misc_feature 1..189: note = P15391
  source 1..189: mol_type = other RNA
ttcctcctatggatcctcgccgccgtatcctccggcctcttcttctactcattcctactcaccgccgtatccctatccaaaatgctcaaaaaacgctcccccctcaccaccggcgtatatgtcaaaatgccccccaccgaacccgaatgcgaaaaacaattccaaccctacttcatccccatcaactga

SEQ ID NO: 76867 - RNA, 219 nt, synthetic construct
  misc_feature 1..219: note = P16410
  source 1..219: mol_type = other RNA
atggggtggataagagggcgcaggagcaggcactcgtgggagatgtcagaatttcacaattacaacctagacctcaagaaatcggactttagcacgcgctggcaaaagcaaaggtgcccggtcgtgaaatcgaaatgccgagagaacgcgagcccgttctttttctgctgcttcatcgcagtcgcgatggggatcagattcataatcatggtcgcgtga

SEQ ID NO: 76868 - RNA, 192 nt, synthetic construct
  misc_feature 1..192: note = P16671
  source 1..192: mol_type = other RNA
ctctgctacatactagacgccatcctcttcctctacggaatcgtcctcacactcctatactgccgcctcaaaatccaagtccgcaaagccgccatcacctcctacgaaaaatccgacggcgtctacaccggcctctcaacacgcaaccaagaaacatacgaaaccctcaaacacgaaaaacccccccaatga

SEQ ID NO: 76869 - RNA, 213 nt, synthetic construct
  misc_feature 1..213: note = P26718
  source 1..213: mol_type = other RNA
ggcatcatcatgatccaaacactactcataatcctcttcataatcgtacccatcttcctcctcctagacaaagacgactccaaagccggcatggaagaagaccacacctacgaaggactagacatagaccaaaccgccacctacgaagacatcgtcaccctacgcaccggcgaagtcaaatggtccgtcggcgaacaccccggccaagaatga

SEQ ID NO: 76870 - RNA, 249 nt, synthetic construct
  misc_feature 1..249: note = P30273
  source 1..249: mol_type = other RNA
tggataaccgcggtcctgcccacggtcataatctgtgtcatggtcttttgcctgatcttgtggaagtggaagaaaaagaaaaggcccagaaactcgtacaaatgcgggaccaataccatggaaagggaagagagcgagcaaacgaaaaagcgcgagaaaatacacatacccgagcgctcagacgaggcccagcgcgtattcaagagctcgaaaacgagctcgtgcgataaatcggacacgtgcttttga

SEQ ID NO: 76871 - RNA, 249 nt, synthetic construct
  misc_feature 1..249: note = P32248
  source 1..249: mol_type = other RNA
ggaggcaccgtcctcctcctcctcttcgtaatctccatcacaaccataatcgtaatcttcctcaaccgccgccgccgacgcgaacgcagagacctattcacagaatcctgggacacccaaaaagcacccaacaactaccgctcccccatatccacctcacaacccacaaaccaatccatggacgacacccgagaagacatctacgtcaactacccaacattctcccgccgccccaaaacccgcgtctga

SEQ ID NO: 76872 - RNA, 303 nt, synthetic construct
  misc_feature 1..303: note = P40259
  source 1..303: mol_type = other RNA
ctagtaggcgccggcgtcgtactaatgctaatcatactcgtcgccctcctcatgctcgtcttccgatccaaacgcgaagtcaaacgccaaaaataccgcctctcccaactctacaaatggcaagaagaagactccggacccgcccccggcaccttccaaaacatcggcttcgacatctgccaagacgacgactccatccacctagaatccatatactccaacttccaaccatccctccgccacatcgaccccgaaaccaaaatccgcatccaacgaccccaagtcatgaccacctccttctga

SEQ ID NO: 76873 - RNA, 177 nt, synthetic construct
  misc_feature 1..177: note = P42081
  source 1..177: mol_type = other RNA
atgtccgactccaaagaaccccgcctccaacaactcggcctcctcgaagaagaacaactccgcggcctcggcttccgacaaacccgcggctacaaatcactagccggctgcctcggccacggccccctcgtcctccaactcctctccttcaccctcctcgcaggcctcctcgtctga

SEQ ID NO: 76874 - RNA, 645 nt, synthetic construct
  misc_feature 1..645: note = Q15762
  source 1..645: mol_type = other RNA
gccgtaattctcttctttttcaccttcttcatcaccaccatggtcatgctcgccgctctcgcccaccaccttttctactgggacgtctggttcatctacaacgtctgcctcgcaaaagttaaaggctaccgatccctatcaacctcacaaacattctacgacgcctacatctcatacgacaccaaagatgcctccgtcaccgactgggttatcaacgaactcagataccacctcgaagaatcccgcgacaaaaacgtcctcctctgcttagaagaacgcgactgggaccccggattagccataatcgacaacctcatgcaatccatcaaccaatccaaaaaaaccgtcttcgtccttaccaaaaaatacgctaaatcctggaacttcaaaacagccttctacctagcactccaacgactcatggacgaaaacatggacgtcatcatcttcatcctcctcgaacccgtcctccaacactcacaatacctccgcttacgccaacgcatctgcaaatcctccatcctccagtggcccgacaaccccaaagccgaaggactcttctggcaaacactacgaaatgtcgtcctaaccgaaaacgactcccgctacaacaacatgtacgtcgactcaatcaaacaatactga

SEQ ID NO: 76875 - RNA, 102 nt, synthetic construct
  misc_feature 1..102: note = Q685J3
  source 1..102: mol_type = other RNA
ctcctcggcctaatcgaaatgatactcctatccgtcggcgtcgtcatgttcgtagccttcatgatctcatactgcgcctgccgctccaaaaccataaaatga

SEQ ID NO: 76876 - RNA, 120 nt, synthetic construct
  misc_feature 1..120: note = Q9NNX6
  source 1..120: mol_type = other RNA
gaccgctacgtcgcaatcgtccaagccgtctccgcccaccgccaccgcgcccgcgtcctcctcatatccaaactatcctgcgtcggcatctggatcctcgccacagtcctatccatatga

SEQ ID NO: 76877 - RNA, 129 nt, synthetic construct
  misc_feature 1..129: note = Q9NR97
  source 1..129: mol_type = other RNA
cgcacgctcttgcaagcgcgcaatttcgagcgcaataaagcgatcaaggtcataatcgcggtcgtggtcgtgttcatagtctttcaattgccctataacggggtcgtgctcgcgcaaacggtcgcgtga

SEQ ID NO: 76878 - RNA, 105 nt, synthetic construct
  misc_feature 1..105: note = A0A5B9
  source 1..105: mol_type = other RNA
accatactctatgaaatactcttgggcaaggccacgctctatgccgtgctcgtgagcgcgctcgtgctcatggccatggtcaagcgcaaggactcgcgcgggtga

SEQ ID NO: 76879 - RNA, 75 nt, synthetic construct
  misc_feature 1..75: note = B7Z8K6
  source 1..75: mol_type = other RNA
ctcggcctccgcatgctcttcgccaaaaccgtcgccgtcaacttcctcctcaccgccaaactcttcttcctctga

SEQ ID NO: 76880 - RNA, 627 nt, synthetic construct
  misc_feature 1..627: note = B9A064
  source 1..627: mol_type = other RNA
accatcatcggcgtatccgtcctctcagtcctcgtcgtctccgtcgtcgccgtcctcgtctacaaattctacttccacctcatgctactcgccggctgcatcaaatacggccgcggcgaaaacatctacgacgccttcgtcatctactcctcccaagacgaagactgggtccgcaacgaactcgtcaaaaacctagaagaaggcgttccacccttccaactctgcctacactaccgcgacttcatccccggcgtagccatcgccgcaaacatcatccacgaaggcttccacaaatcccgcaaagtcatcgtcgtcgtctcccaacacttcatccaatcccgatggtgcatcttcgaatacgaaatcgcccaaacctggcaattcctcagctcccgcgccggcataatcttcatcgtcctccaaaaagtcgagaaaaccctactccgccaacaagtcgaactctaccgcctactatcccgcaacacctacctagaatgggaagactccgtcctaggccgccacatcttctggcgccgactccgcaaagccctcctcgacggcaaatcctggaaccccgaaggcaccgtcggaaccggctgcaactggcaagaagctacctccatctga

SEQ ID NO: 76881 - RNA, 189 nt, synthetic construct
  misc_feature 1..189: note = O00206
  source 1..189: mol_type = other RNA
atggcgctcatagtcttgggcggggtcgcgggcttgctcttgttcataggcttgggcatattcttttgcgtgcgctgtcgccatcgcaggcgccaggccgagcgcatgagccagatcaagcgcttgctctcggaaaagaaaacgtgccagtgcccgcacaggttccagaaaacgtgctcgcccatatga

SEQ ID NO: 76882 - RNA, 84 nt, synthetic construct
  misc_feature 1..84: note = P01730
  source 1..84: mol_type = other RNA
atactcttgggcaaggccacgctctatgccgtgctcgtgagcgcgctcgtgctcatggccatggtcaagcgcaaggacttttga

SEQ ID NO: 76883 - RNA, 246 nt, synthetic construct
  misc_feature 1..246: note = P01850
  source 1..246: mol_type = other RNA
gtcatgtccgtcgccaccatcgtcatcgtcgacatctgcatcaccggcggcctcctcctcctcgtctactactggtccaaaaaccgcaaagccaaagccaaacccgtcacccgcggcgccggcgccggcggccgccaacgcggccaaaacaaagaacgccccccccccgtccccaaccccgactacgaacccatccgcaaaggccaacgcgacctctactcaggcctcaaccaacgccgcatctga

SEQ ID NO: 76884 - RNA, 2190 nt, synthetic construct
  misc_feature 1..2190: note = P07766
  source 1..2190: mol_type = other RNA
gcgctaatcgccttcctggccttcctcatcatagtgacaagcatagcactcctagtcgtactatacaaaatctacgatttacacaagaagcgcagctgcaacctcgacgaacaacaagagctagtagaacgcgacgacgaaaagcagctaatgaacgtcgaacccatccacgcagacatcctcctcgaaacgtacaaacgtaagatagccgacgaaggacgactattcctcgccgagttccaatccatcccaagggtattcagcaaatttccaatcaaagaagcccgcaaaccattcaaccaaaacaagaacagatacgtggacatcctaccctacgactacaatcgagtagaactcagcgaaatcaacggagacgccggatcgaactatatcaatgcctcgtacatagacggtttcaaagagccccgcaaatacatcgccgcgcaaggacccagagacgaaaccgtcgacgacttctggcggatgatctgggagcagaaagctacagtcatcgtcatggtaaccagatgcgaggaaggcaaccgcaacaaatgcgccgagtattggcccagcatggaagaaggcacccgggccttcggggacgtagtggtaaagatcaaccagcacaaacgctgccccgactacatcatacaaaaactcaatatcgttaacaagaaagagaaagctaccggcagggaggtcacacacatacaattcaccagctggcccgaccacggcgtcccagaagacccacacctcctactcaagctccggcgccgagtcaacgcattcagcaatttcttctcaggaccaatcgtggtccattgctcagcaggagtcggcaggaccgggacctacatcggtatcgacgcaatgctagaaggcttagaagccgaaaacaaagtagacgtgtacggctacgtagtcaaactcagacgccaacggtgcctaatggtacaagtcgaagcacaatacatactaatacaccaggccctagtagaatacaatcaattcggcgagaccgaggtcaacctctcggaactgcacccctacctacacaacatgaagaaacgcgatcccccaagcgaaccctcacccctagaggcagagttccaacgcctcccatcctacaggtcatggagaacccaacacattgggaatcaagaagaaaacaaaagcaaaaaccgaaactcaaacgtcataccctacgactacaaccgggtaccgctcaaacacgaactcgaaatgtccaaagaatccgaacacgacagcgacgaatcctccgacgacgactccgactccgaagaaccctccaagtacatcaacgcatccttcataatgagttactggaaacccgaagtcatgattgccgcccaaggccccttgaaagaaactataggagacttctggcaaatgatattccaacgcaaggtaaaagtaatcgtaatgctcaccgaactcaaacacggcgaccaagaaatctgcgcccaatactggggagaaggtaaacaaacctacggcgacatcgaagtcgatctcaaggatacagacaaatcctccacatacaccctacgcgtcttcgagctcagacacagcaaacgcaaagacagccgaacggtctaccaatatcagtacacaaactggtcagtggaacagctccccgcagaacctaaagaactcatatccatgatacaagtcgtcaaacagaagctcccacagaaaaactcctccgagggcaacaaacaccacaaatccaccccactcctcatacactgtcgggatggctcccaacaaacaggcatcttctgcgcactactaaacctcctcgaaagcgccgaaaccgaagaggttgtagacatcttccaagtggtgaaagcgctacgaaaagcccggccagggatggtctctaccttcgaacaataccaattcctatacgacgtaatagcttccacctaccccgcccaaaacggacaagtcaagaaaaacaaccaccaagaggacaaaatagagttcgacaacgaagtagacaaagtgaaacaagacgccaactgcgtaaaccctctcggcgcccccgaaaaactccccgaagcaaaagaacaagccgaaggatcagaacccacctcagggacggaaggccccgaacactccgtcaacggacccgcatcccccgccctaaatcaagggagctga

SEQ ID NO: 76885 - RNA, 141 nt, synthetic construct
  misc_feature 1..141: note = P08575
  source 1..141: mol_type = other RNA
gtgagcttttgcttggtcatggtcttgctctttgccgtggacacgggcctgtacttcagcgtgaaaacgaacatacgctcgagcacgcgcgactggaaggaccataaatttaaatggcgcaaggacccgcaagataaatga

SEQ ID NO: 76886 - RNA, 207 nt, synthetic construct
  misc_feature 1..207: note = P08637
  source 1..207: mol_type = other RNA
ttctgggtcctcgtcgtcgtcggcggcgtcctcgcctgctactccctcctcgtcaccgtcgccttcatcatcttctgggtccgctccaaacgctcccgcctcctccactccgactacatgaacatgaccccccgccgccccggccccacccgcaaacactaccaaccctacgcccccccccgcgacttcgccgcctaccgctcctga

SEQ ID NO: 76887 - RNA, 252 nt, synthetic construct
  misc_feature 1..252: note = P10747
  source 1..252: mol_type = other RNA
atcatcaccgccgaaggcatcatcctcctcttctgcgccgtcgtccccggcaccctcctcctcttccgcaaacgctggcaaaacgaaaaactcggcctcgacgccggcgacgaatacgaagacgaaaacctctacgaaggcctcaacctcgacgactgctccatgtacgaagacatctcccgcggcctccaaggcacctaccaagacgtcggctccctcaacatcggcgacgtccaactcgaaaaaccctga

SEQ ID NO: 76888 - RNA, 798 nt, synthetic construct
  misc_feature 1..798: note = P11912
  source 1..798: mol_type = other RNA
gtaagcgccgtcacactcgcatacctcatcttctgcttatgctcactcgtaggaatactacacctccaacgcgcactcgtcctacgacgaaaacgcaaacgcatgaccgaccccacacgccgattcttcaaagtaacccccccgccaggatcaggcccgcaaaaccaatacggcaacgtcctaagcctacccaccccaaccagcggcctcggacgagcccaaagatgggcagccggactaggaggcacagcacccagctacggcaacccctcgagcgacgtccaagccgacggcgcactcggaagccggagcccccccggagtaggacccgaagaagaagaaggagaagggtacgaagaaccagactcagaagaagactcagaattctacgaaaacgacagcaacctcggacaagaccaactcagccaagacgggagcggctacgaaaacccagaagacgaaccactcggacccgaagacgaagactcattctcaaacgcagaatcctacgaaaacgaagacgaagaactaacccaacccgtagccaggaccatggacttcctatcaccccacggctcagcctgggacccaagcagagaagcaacatcactcggcagccaaagctacgaagacatgcgcggaatactatacgcagcaccccagcttagaagcatacgaggacaacccggcccaaaccacgaagaagacgcagactcatacgaaaacatggacaaccccgacggccccgacccagcctggggcggaggcggaagaatgggaacctggtccacaagatga

SEQ ID NO: 76889 - RNA, 189 nt, synthetic construct
  misc_feature 1..189: note = P15391
  source 1..189: mol_type = other RNA
ttcctcctctggatcctcgccgccgtctcctccggcctcttcttctactccttcctcctcaccgccgtctccctctccaaaatgctcaaaaaacgctcccccctcaccaccggcgtctacgtcaaaatgccccccaccgaacccgaatgcgaaaaacaattccaaccctacttcatccccatcaactga

SEQ ID NO: 76890 - RNA, 219 nt, synthetic construct
  misc_feature 1..219: note = P16410
  source 1..219: mol_type = other RNA
atggggtggatacgcgggcgcaggagcaggcactcgtgggagatgtcggaatttcacaattacaatctcgatctcaagaaatcggactttagcacgcgctggcaaaagcaaaggtgcccggtcgtgaaatcgaaatgtcgcgagaacgcgagcccgttctttttctgttgctttatcgcggtcgcgatggggatcaggttcataatcatggtcgcgtga

SEQ ID NO: 76891 - RNA, 192 nt, synthetic construct
  misc_feature 1..192: note = P16671
  source 1..192: mol_type = other RNA
ctctgctacatcctcgacgccatcctcttcctctacggcatcgtcctcaccctcctctactgccgcctcaaaatccaagtccgcaaagccgccatcacctcctacgaaaaatccgacggcgtctacaccggcctctccacccgcaaccaagaaacctacgaaaccctcaaacacgaaaaacccccccaatga

SEQ ID NO: 76892 - RNA, 213 nt, synthetic construct
  misc_feature 1..213: note = P26718
  source 1..213: mol_type = other RNA
ggcatcatcatgatccaaaccctactcatcatcctcttcatcatcgtccccatcttcctcctcctcgacaaagacgactccaaagccggcatggaagaagaccacacctacgaaggcctcgacatcgaccaaaccgccacctacgaagacatcgtcaccctccgcaccggcgaagtcaaatggtccgtcggcgaacaccccggccaagaatga

SEQ ID NO: 76893 - RNA, 249 nt, synthetic construct
  misc_feature 1..249: note = P30273
  source 1..249: mol_type = other RNA
tggataaccgcggtcttgcccacggtcataatctgtgtcatggtcttctgcttgatcctgtggaagtggaagaaaaagaaaaggcccaggaactcgtacaagtgcgggaccaataccatggaaagggaagagagcgagcaaacgaaaaagcgcgagaaaatacacatacccgagcgctcggacgaggcccagcgcgtgttcaagagctcgaaaacgagctcgtgcgataaatcggacacgtgcttctga

SEQ ID NO: 76894 - RNA, 249 nt, synthetic construct
  misc_feature 1..249: note = P32248
  source 1..249: mol_type = other RNA
ggcggcaccgtcctcctcctcctcttcgtcatctccatcaccaccatcatcgtcatcttcctcaaccgccgccgccgccgcgaacgccgcgacctcttcaccgaatcctgggacacccaaaaagcccccaacaactaccgctcccccatctccacctcccaacccaccaaccaatccatggacgacacccgcgaagacatctacgtcaactaccccaccttctcccgccgccccaaaacccgcgtctga

SEQ ID NO: 76895 - RNA, 303 nt, synthetic construct
  misc_feature 1..303: note = P40259
  source 1..303: mol_type = other RNA
ctcgtcggcgccggcgtcgtcctcatgctcatcatcctcgtcgccctcctcatgctcgtcttccgctccaaacgcgaagtcaaacgccaaaaataccgcctctcccaactctacaaatggcaagaagaagactccggccccgcccccggcaccttccaaaacatcggcttcgacatctgccaagacgacgactccatccacctcgaatccatctactccaacttccaaccctccctccgccacatcgaccccgaaaccaaaatccgcatccaacgcccccaagtcatgaccacctccttctga

SEQ ID NO: 76896 - RNA, 177 nt, synthetic construct
  misc_feature 1..177: note = P42081
  source 1..177: mol_type = other RNA
atgtccgactccaaagaaccccgcctccaacaactcggcctcctcgaagaagaacaactccgcggcctcggcttccgccaaacccgcggctacaaatccctcgccggctgcctcggccacggccccctcgtcctccaactcctctccttcaccctcctcgccggcctcctcgtctga

SEQ ID NO: 76897 - RNA, 645 nt, synthetic construct
  misc_feature 1..645: note = Q15762
  source 1..645: mol_type = other RNA
gccgtcatcctcttcttcttcaccttcttcatcacaaccatggtcatgctcgccgccctcgcccaccacctcttctactgggacgtctggttcatctacaacgtctgcctcgccaaagtcaaaggctaccgctccctctccacctcccaaaccttctacgacgcctacatctcctacgacaccaaagacgcctccgtcaccgactgggtcatcaacgaactccgataccacctcgaagaatcccgcgacaaaaacgtcctcctctgcctcgaagaacgcgactgggaccccggcctcgctatcatcgacaacctcatgcaatcaatcaaccaatccaaaaaaacagtcttcgtactcaccaaaaaatacgccaaatcatggaacttcaaaaccgccttctacctcgcccttcaacgcctcatggacgaaaacatggacgtcatcatcttcatcctcctcgaacccgtcctccaacactcccaatacctccgcctacgacaacgcatctgcaaatccagcatcctccaatggcccgacaaccccaaagccgaaggcctcttctggcaaaccctccgcaacgtcgtcctcaccgaaaacgactcccgttacaacaacatgtacgtcgactccatcaaacaatactga

SEQ ID NO: 76898 - RNA, 102 nt, synthetic construct
  misc_feature 1..102: note = Q685J3
  source 1..102: mol_type = other RNA
ctcctcggcctcatcgaaatgatcctcctctccgtcggcgtcgtcatgttcgtcgccttcatgatctcctactgcgcctgccgctccaaaaccatcaaatga

SEQ ID NO: 76899 - RNA, 120 nt, synthetic construct
  misc_feature 1..120: note = Q9NNX6
  source 1..120: mol_type = other RNA
gaccgctacgtcgccatcgtccaagccgtctccgcccaccgccaccgcgcccgcgtcctcctcatctccaaactctcctgcgtcggcatctggatcctcgccaccgtcctctccatctga

SEQ ID NO: 76900 - RNA, 129 nt, synthetic construct; identical to SEQ ID NO: 76877
  misc_feature 1..129: note = Q9NR97
  source 1..129: mol_type = other RNA

SEQ ID NO: 76901 - RNA, 105 nt, synthetic construct; identical to SEQ ID NO: 76786
  misc_feature 1..105: note = A0A5B9
  source 1..105: mol_type = other RNA

SEQ ID NO: 76902 - RNA, 75 nt, synthetic construct; identical to SEQ ID NO: 76787
  misc_feature 1..75: note = B7Z8K6
  source 1..75: mol_type = other RNA

SEQ ID NO: 76903 - RNA, 627 nt, synthetic construct
  misc_feature 1..627: note = B9A064
  source 1..627: mol_type = other RNA
acaataataggcgtaagtgtattatcggtactagtagtaagcgtagtagcagtactagtatataaattttactttcacttaatgctactagcgggctgtataaaatatggaagaggagaaaatatatacgacgcattcgtaatctacagttcacaagacgaagactgggtaagaaatgaattagtaaaaaacttagaagaaggagtaccaccattccaactatgtctacattacagagactttataccaggagtagcaatagcagcaaacataatacatgaaggattccataaatcaagaaaagtaatagtagtagtatcacaacacttcatacaaagcagatggtgcatattcgaatacgaaatagcacaaacatggcaattcttaagctcaagagcaggaataatatttatagtactacaaaaagtagaaaaaacattactaagacaacaagtagaactatatagattactatcaagaaatacatatctagaatgggaagactcagtcttaggaagacacatattctggcgaagactaagaaaagcactattagacggaaaatcatggaatccagaaggaacagtaggaacaggatgcaactggcaagaagcaacatcaatatga

SEQ ID NO: 76904 - RNA, 189 nt, synthetic construct; identical to SEQ ID NO: 76789
  misc_feature 1..189: note = O00206
  source 1..189: mol_type = other RNA

SEQ ID NO: 76905 - RNA, 84 nt, synthetic construct; identical to SEQ ID NO: 76790
  misc_feature 1..84: note = P01730
  source 1..84: mol_type = other RNA

SEQ ID NO: 76906 - RNA, 246 nt, synthetic construct
  misc_feature 1..246: note = P01850
  source 1..246: mol_type = other RNA
gtaatgtcagtagcaacaatagtaatagtagacatatgcataacaggaggactactactactagtatactactggtcaaaaaacagaaaagcaaaagcaaaaccagtaacaagaggagcaggagcaggaggaagacaaagaggacaaaacaaagaaagaccaccaccagtaccaaacccagactacgaaccaataagaaaaggacaaagagacctatactcaggactaaaccaaagaagaatatga

SEQ ID NO: 76907 - RNA, 2190 nt, synthetic construct
  misc_feature 1..2190: note = P07766
  source 1..2190: mol_type = other RNA
gcactaatagcattcctagcattcctaataatagtaacaagcatagcattactagtagtactttacaaaatatacgacctacataaaaaacgaagctgtaacctagacgaacaacaagaattagttgaaagagacgacgaaaaacaactaatgaatgtagaacccatacatgcagatatactcttagaaacctataaaagaaaaatagccgatgaaggaagattattcctagcagaattccaaagtataccacgagtattctcaaaattcccaattaaagaagcaagaaaaccattcaaccaaaacaaaaatagatatgtggacatactaccatacgactacaacagagtagaattatcagaaattaatggcgacgcaggaagcaattacataaatgcatcatacatagacggcttcaaagaaccaagaaaatacatagcagcccaaggaccaagagacgaaacagtagatgacttttggaggatgatatgggaacaaaaagcaaccgtgatagtcatggtaacacgttgtgaagaaggaaatagaaataaatgcgctgaatactggccctctatggaagaaggcacacgagccttcggagatgtagtagtaaaaataaatcaacataaaagatgtccggactatatcatacaaaaattaaacatagtaaataaaaaagaaaaagcaaccggacgagaagtcacacatatacaattcacatcatggcccgaccatggtgtacctgaagaccctcacttattattaaaattgaggcgaagagtaaacgcatttagtaatttcttctcaggaccaatagtagtacattgcagtgccggtgttgggcgcacagggacatacataggtatcgacgccatgctcgaaggactcgaagccgaaaacaaagtggacgtctatggctatgtagtcaaattacgaaggcaacgctgtctaatggttcaagtagaagcacaatacatacttatacatcaggcattagtagaatataaccaattcggagaaactgaagtaaacttaagtgaactacacccatatttacataacatgaaaaaacgagatccacccagcgaaccatcgcctctggaggcagaatttcaaagattaccatcatatagatcttggcgaacacaacacatcggtaatcaagaagaaaataaaagcaaaaatagaaattcaaatgtgatcccatatgactacaatcgagtaccattaaaacacgaactagaaatgtctaaagaaagcgaacacgattcagatgaaagcagtgatgacgactcagacagtgaagaacccagtaaatacatcaacgccagctttataatgtcctattggaaaccagaagtaatgatagccgcacaaggacctctaaaagaaacaattggagacttttggcagatgatatttcaaagaaaagtaaaagtcattgtgatgttaactgagctaaaacacggagaccaagaaatatgtgcacaatactggggagaagggaaacaaacatatggtgacattgaagtcgacttaaaagacacagacaaaagctctacatatacactacgagttttcgaattacgacattcaaaaaggaaagattcacgaacagtataccagtatcaatacaccaattggagcgtcgaacaattaccagcggaaccaaaagaactcatatcaatgatccaagtagtaaaacaaaaattaccacaaaaaaactcatccgaaggaaacaaacatcacaaatcaaccccattactcatacattgtagagacggaagtcaacaaaccggaattttctgcgcactcttaaacctactagaatcagctgaaacagaagaagtagtagatatattccaagtagttaaagctctccgtaaagcaagaccaggaatggtatcaacattcgaacaataccaatttctctacgacgtaatagcatcaacatacccagcacaaaacggacaagtaaaaaaaaataaccaccaagaagataaaatagaatttgataacgaagtcgacaaggtaaagcaagacgccaattgcgtaaatcccctgggtgcaccggaaaaactaccagaagcaaaggaacaagcagaaggaagcgaaccaacaagcggcacagaaggacctgaacacagcgtaaacggaccagccagtccagcactaaatcaaggttcatga

SEQ ID NO: 76908 - RNA, 141 nt, synthetic construct; identical to SEQ ID NO: 76793
  misc_feature 1..141: note = P08575
  source 1..141: mol_type = other RNA

SEQ ID NO: 76909 - RNA, 207 nt, synthetic construct; identical to SEQ ID NO: 76794
  misc_feature 1..207: note = P08637
  source 1..207: mol_type = other RNA

SEQ ID NO: 76910 - RNA, 252 nt, synthetic construct
  misc_feature 1..252: note = P10747
  source 1..252: mol_type = other RNA
ataataacagcagaaggaataatactactattctgcgcagtagtaccaggaacactactactattcagaaaaagatggcaaaacgaaaaactaggactagacgcaggagacgaatacgaagacgaaaacctatacgaaggactaaacctagacgactgctcaatgtacgaagacatatcaagaggactacaaggaacataccaagacgtaggatcactaaacataggagacgtacaactagaaaaaccatga

SEQ ID NO: 76911 - RNA, 798 nt, synthetic construct
  misc_feature 1..798: note = P11912
  source 1..798: mol_type = other RNA
gtaagtgcggtaacattagcatatctaatattttgtttatgtagtctagtaggaatactacacttacaaagagcattagtattaagaagaaaaagaaaaagaatgacagatcctacaagaagattctttaaagtaacaccaccaccaggatcaggaccacaaaatcaatatggaaatgtattatcattgccaacaccaacaagcggattagggagagcacaaagatgggcagcaggactaggaggaacagcaccgagctatggaaacccatcgtcagatgtacaagcagatggagcactaggaagtagaagcccaccaggagtaggaccagaagaagaagaaggagaaggatatgaagaaccagattcagaagaagacagtgaattttatgaaaacgatagtaatttaggacaagatcaattgagtcaagacggaagtggatatgaaaatccagaagatgaaccattaggaccagaagatgaagattcattttcaaatgcagaatcatatgaaaatgaagatgaagaactaacccagccagtagcaagaacaatggactttttatcaccacatggatcagcatgggatccaagtagagaagcaacaagcctaggaagtcaaagttatgaagatatgagaggaatattatatgcagcaccacaattaagaagtataagaggacaaccaggaccaaatcatgaagaagatgcagattcatatgaaaatatggataatccagatggaccagatccagcatggggaggaggaggaagaatgggtacatggtcaacaagatga

SEQ ID NO: 76912 - RNA, 189 nt, synthetic construct; identical to SEQ ID NO: 76797
  misc_feature 1..189: note = P15391
  source 1..189: mol_type = other RNA

SEQ ID NO: 76913 - RNA, 219 nt, synthetic construct; identical to SEQ ID NO: 76798
  misc_feature 1..219: note = P16410
  source 1..219: mol_type = other RNA

SEQ ID NO: 76914 - RNA, 192 nt, synthetic construct; identical to SEQ ID NO: 76799
  misc_feature 1..192: note = P16671
  source 1..192: mol_type = other RNA

SEQ ID NO: 76915 - RNA, 213 nt, synthetic construct; identical to SEQ ID NO: 76800
  misc_feature 1..213: note = P26718
  source 1..213: mol_type = other RNA

SEQ ID NO: 76916 - RNA, 249 nt, synthetic construct; identical to SEQ ID NO: 76801
  misc_feature 1..249: note = P30273
  source 1..249: mol_type = other RNA

SEQ ID NO: 76917 - RNA, 249 nt, synthetic construct; identical to SEQ ID NO: 76802
  misc_feature 1..249: note = P32248
  source 1..249: mol_type = other RNA

SEQ ID NO: 76918 - RNA, 303 nt, synthetic construct
  misc_feature 1..303: note = P40259
  source 1..303: mol_type = other RNA
ctagtaggagcaggagtagtactaatgctaataatactagtagcactactaatgctagtattcagatcaaaaagagaagtaaaaagacaaaaatacagactatcacaactatacaaatggcaagaagaagactcaggaccagcaccaggaacattccaaaacataggattcgacatatgccaagacgacgactcaatacacctagaatcaatatactcaaacttccaaccatcactaagacacatagacccagaaacaaaaataagaatacaaagaccacaagtaatgacaacatcattctga

SEQ ID NO: 76919 - RNA, 177 nt, synthetic construct; identical to SEQ ID NO: 76804
  misc_feature 1..177: note = P42081
  source 1..177: mol_type = other RNA

SEQ ID NO: 76920 - RNA, 645 nt, synthetic construct
  misc_feature 1..645: note = Q15762
  source 1..645: mol_type = other RNA
gcagtaatactattcttcttcacattcttcataacaacaatggtaatgctcgcagcactagcacaccacctattctactgggacgtatggttcatatacaacgtatgcctagcaaaagtaaaaggatacagatcattatcaacatcacaaacattctacgacgcatacatatcatacgacacaaaagacgcatcagtaacagactgggtaataaacgaactaagataccacctagaagaatcaagagacaaaaacgtactactatgcttagaagaaagagactgggacccaggactagcaataatagataacctaatgcaatcaataaaccaatcaaaaaaaacagtcttcgtactaacaaaaaaatacgcaaaatcatggaacttcaaaacagccttctacctagcactacaaagactaatggacgaaaatatggacgtaataatattcatattattagaacccgtactacaacactcacaatacctaagactaagacaaagaatatgcaaatcctcaatattacaatggccagacaacccaaaagcagaaggcctattctggcaaacactaagaaacgtagtactaacagaaaacgactcaagatacaacaacatgtacgtagactcaataaaacaatactga

SEQ ID NO: 76921 - RNA, 102 nt, synthetic construct; identical to SEQ ID NO: 76806
  misc_feature 1..102: note = Q685J3
  source 1..102: mol_type = other RNA

SEQ ID NO: 76922 - RNA, 120 nt, synthetic construct
  misc_feature 1..120: note = Q9NNX6
  source 1..120: mol_type = other RNA
gatagatatgtagctatagttcaagctgtatctgcacatagacatagagctagagttctattaatatctaaattaagctgtgtaggtatatggatattagcaactgtattaagcatttga

SEQ ID NO: 76923 - RNA, 129 nt, synthetic construct
  misc_feature 1..129: note = Q9NR97
  source 1..129: mol_type = other RNA
agaacactactacaagcaagaaatttcgaaagaaacaaagcaataaaagtaataatagcagtagtagtagtattcatagtattccaactaccatacaacggagtagtactagcacaaacagtagcatga

SEQ ID NO: 76924 - RNA, 105 nt, synthetic construct
  misc_feature 1..105: note = A0A5B9
  source 1..105: mol_type = other RNA
acaatactatacgaaatactactaggaaaagcaacactatatgcagtactagtaagcgcactagtactaatggcaatggtaaaaagaaaagactcaagaggataa

SEQ ID NO: 76925 - RNA, 75 nt, synthetic construct
  misc_feature 1..75: note = B7Z8K6
  source 1..75: mol_type = other RNA
ctaggcctacgcatgctctttgccaaaactgtagccgtaaattttctcctaactgcaaaattattcttcctttga

SEQ ID NO: 76926 - RNA, 627 nt, synthetic construct
  misc_feature 1..627: note = B9A064
  source 1..627: mol_type = other RNA
acaataataggagtaagcgtactatccgtattagtagtgagcgtagtagcagtattagtatataaattttactttcacttaatgttactagcaggatgtataaagtacggaagaggagaaaacatatatgacgcattcgtaatatatagctcacaagacgaagattgggtaagaaatgaattagtgaaaaacttagaagaaggagtaccaccatttcaactatgtctacattacagagactttatacccggagtagcaatagcagcaaacataatacatgaaggattccataaaagcagaaaagtaatagtagtagtatcacaacatttcatacaatcaagatggtgcatattcgaatacgaaatagcacaaacatggcaatttttaagctcaagagcaggaataatatttatagtactacaaaaagtagagaaaacattactaagacaacaagtagaactatatagattactaagtagaaacacatatctagaatgggaagactcagtattaggaagacacatattctggagaagattaagaaaagcattattagacggaaaatcatggaatccagaaggaacagtaggaacaggatgcaattggcaagaagcaacatcaatatga

SEQ ID NO: 76927 - RNA, 189 nt, synthetic construct; identical to SEQ ID NO: 76789
  misc_feature 1..189: note = O00206
  source 1..189: mol_type = other RNA

SEQ ID NO: 76928 - RNA, 84 nt, synthetic construct
  misc_feature 1..84: note = P01730
  source 1..84: mol_type = other RNA
atacttctaggtaaagctacactttacgctgtacttgtatctgcacttgtacttatggctatggttaaacgtaaagatttctga

SEQ ID NO: 76929 - RNA, 246 nt, synthetic construct; identical to SEQ ID NO: 76791
  misc_feature 1..246: note = P01850
  source 1..246: mol_type = other RNA

SEQ ID NO: 76930 - RNA, 2190 nt, synthetic construct
  misc_feature 1..2190: note = P07766
  source 1..2190: mol_type = other RNA
gccctaattgcatttctagcatttctgataattgtaacatccatcgcactattagtagtattatacaaaatatacgacttacacaaaaaaagaagttgcaacttagacgagcaacaggagttagtagaaagagatgacgaaaaacaacttatgaacgttgaaccaatacatgctgacatcttactagaaacgtacaaaaggaaaatagcagatgaaggacgattattcctagcagaattccaatcaatacccagagtattctctaaattcccaataaaagaagcaagaaagccttttaatcaaaacaaaaatagatatgttgacatactcccatacgactacaacagagtagaattatctgagatcaatggcgatgcaggatccaattacataaatgcatcatatatagatggatttaaagaacctcgaaaatacatagcagcacaaggcccacgagacgaaacggtagatgacttctggagaatgatctgggaacaaaaagcaacagtaatagtaatggtaacacgatgcgaagaaggcaatcgaaacaaatgtgcagaatactggccatctatggaagaaggaacacgcgcattcggagacgtcgtagtaaaaataaatcaacataaaagatgtcccgactacataatacaaaaactaaacatagttaataaaaaagaaaaagccactggaagagaagtcacacatatacaattcacatcgtggccagatcacggagtaccagaagatccccacctactactaaaactaagaagaagagtaaatgcattctctaactttttcagcggaccaatagttgtacactgctccgcaggagtaggcagaaccggcacatacataggcattgacgctatgctcgaaggcctagaagcagaaaacaaagttgatgtgtacggatatgtagtaaaactaagacggcaaagatgcctaatggtacaagtagaggcacaatacattctaatacatcaggcactagtagaatataatcaatttggagaaacggaagtaaacctatccgaactacacccttacttacacaatatgaaaaaaagagacccaccatcagaaccctcacccctagaggcagaattccaacgtctaccgtcatatagaagctggagaactcaacatataggaaatcaagaagagaacaaatcaaaaaaccgcaatagtaacgtaataccttatgactacaacagagtaccactaaaacacgaattagaaatgagtaaagaatccgaacacgactcagatgaaagttcagatgatgacagcgactcagaagaaccatccaaatacataaatgcatcctttatcatgtcctactggaaaccagaagtaatgatagcagcacaaggaccacttaaagaaacaataggagatttttggcaaatgatattccaaaggaaagttaaagttatcgtcatgcttacagaacttaaacacggagatcaagaaatctgtgcccaatattggggagaaggtaagcaaacttacggagacatagaagtagatctcaaagacacagacaaatcatcaacatacactttacgagtatttgaactaaggcattcaaaaagaaaagactcaaggacagtgtaccaatatcagtacaccaactggtcagtagaacaactaccagctgaaccaaaagaactaatcagcatgattcaagttgtaaaacaaaaactaccacaaaaaaattcatctgaaggtaacaaacatcacaaatcaactccacttctaatacactgcagagatggatctcaacaaacaggcatattttgtgcactcctaaacttactagaatcagcagaaacggaagaagttgtagacatatttcaagtagtaaaagcactaagaaaagcaagacctggaatggtaagtacattcgaacaataccaattcttatacgatgtcatcgcctcaacatacccagctcaaaatggacaagtcaaaaaaaacaaccaccaagaagataaaatagaattcgacaacgaagtcgacaaagtaaaacaagacgctaactgcgtaaaccctttaggagcaccagaaaaattaccagaagcaaaggagcaggcagaagggtctgagcccacatcaggaacagaaggacctgaacacagtgtaaatggaccagcatctccagcattaaaccaaggatcatga

SEQ ID NO: 76931 - RNA, 141 nt, synthetic construct; identical to SEQ ID NO: 76793
  misc_feature 1..141: note = P08575
  source 1..141: mol_type = other RNA

SEQ ID NO: 76932 - RNA, 207 nt, synthetic construct; identical to SEQ ID NO: 76794
  misc_feature 1..207: note = P08637
  source 1..207: mol_type = other RNA

SEQ ID NO: 76933 - RNA, 252 nt, synthetic construct
  misc_feature 1..252: note = P10747
  source 1..252: mol_type = other RNA
ataataacagcagaaggaataatattactattctgcgcagtagtaccaggaacattactattattcagaaaaagatggcaaaacgaaaaattaggactagacgcaggagacgaatatgaagacgaaaatctatatgaaggactaaatctagatgactgtagcatgtacgaagacataagcagaggactacaaggaacatatcaagacgtaggaagcctaaacataggagacgtacaactagaaaaaccatga

SEQ ID NO: 76934 - RNA, 798 nt, synthetic construct
  misc_feature 1..798: note = P11912
  source 1..798: mol_type = other RNA
gtaagtgcagtaacattggcatatttaatattttgtttatgttcactagtaggaatattacatttacaaagagcattagtattaagaagaaaaagaaaaagaatgactgatccaacaagaagattttttaaagtaacaccaccaccaggatcaggaccacaaaatcaatatggaaatgtattaagtttacctacaccaacaagtggattagggagagcacaaagatgggcagcaggattaggaggaacagcaccaagctatggaaatccatcaagcgatgtacaagcagatggagcattaggtagtagaagtccaccaggagtaggacccgaagaagaagaaggagaaggatatgaagaaccagattcagaagaagatagcgaattttatgaaaatgattcaaatctaggacaagatcaattaagtcaagatggaagtggatacgaaaatccagaagatgaaccattaggaccagaagacgaagatagtttttcaaatgcagaatcatatgaaaatgaagacgaagaattgacacaacctgtagcaagaacaatggattttttaagtccacatggaagtgcttgggatccaagcagagaagcaacatcattaggaagtcaaagttatgaagatatgagaggaatattatatgcagcaccacaattaagaagtataagaggacaaccaggaccaaatcatgaagaagatgcagatagttatgaaaatatggataatccagatggaccagatccagcatggggaggaggaggaagaatgggaacatggtcaactagatga

SEQ ID NO: 76935 - RNA, 189 nt, synthetic construct; identical to SEQ ID NO: 76797
  misc_feature 1..189: note = P15391
  source 1..189: mol_type = other RNA

SEQ ID NO: 76936 - RNA, 219 nt, synthetic construct; identical to SEQ ID NO: 76798
  misc_feature 1..219: note = P16410
  source 1..219: mol_type = other RNA

SEQ ID NO: 76937 - RNA, 192 nt, synthetic construct; identical to SEQ ID NO: 76799
  misc_feature 1..192: note = P16671
  source 1..192: mol_type = other RNA

SEQ ID NO: 76938 - RNA, 213 nt, synthetic construct; identical to SEQ ID NO: 76800
  misc_feature 1..213: note = P26718
  source 1..213: mol_type = other RNA

SEQ ID NO: 76939 - RNA, 249 nt, synthetic construct; identical to SEQ ID NO: 76801
  misc_feature 1..249: note = P30273
  source 1..249: mol_type = other RNA

SEQ ID NO: 76940 - RNA, 249 nt, synthetic construct; identical to SEQ ID NO: 76802
  misc_feature 1..249: note = P32248
  source 1..249: mol_type = other RNA

SEQ ID NO: 76941 - RNA, 303 nt, synthetic construct; identical to SEQ ID NO: 76918
  misc_feature 1..303: note = P40259
  source 1..303: mol_type = other RNA

SEQ ID NO: 76942 - RNA, 177 nt, synthetic construct; identical to SEQ ID NO: 76804
  misc_feature 1..177: note = P42081
  source 1..177: mol_type = other RNA

SEQ ID NO: 76943 - RNA, 645 nt, synthetic construct
  misc_feature 1..645: note = Q15762
  source 1..645: mol_type = other RNA
gcagtaatactattcttcttcacattcttcataacaacaatggtcatgttagcagcactagcacaccacctattttattgggacgtatggttcatatacaacgtatgcctagcaaaagtaaaaggatacagatcactatcaacatcacaaacattctacgacgcctacatatcatacgacacaaaagacgcctcagtaacagactgggtaataaacgaattaagataccacttagaagaatcacgagacaaaaacgtactattatgcctagaagaaagagactgggacccaggactagcaataatagacaacctaatgcaatcaatcaaccaatccaaaaaaactgtattcgtactaacaaaaaaatacgcaaaatcatggaacttcaaaacagccttctacttagcattacaaagactaatggacgaaaacatggacgtaataatattcatcttactagaaccagtactccaacactcacaatacctaagactacgacaaagaatatgcaaatcatcaatactacaatggccagacaacccaaaagcagaaggactattctggcaaacacttagaaacgtagtactaacagaaaacgactcaagatacaacaacatgtacgtagactcaataaaacaatattga

SEQ ID NO: 76944 - RNA, 102 nt, synthetic construct; identical to SEQ ID NO: 76806
  misc_feature 1..102: note = Q685J3
  source 1..102: mol_type = other RNA

SEQ ID NO: 76945 - RNA, 120 nt, synthetic construct; identical to SEQ ID NO: 76807
  misc_feature 1..120: note = Q9NNX6
  source 1..120: mol_type = other RNA

SEQ ID NO: 76946 - RNA, 129 nt, synthetic construct
  misc_feature 1..129: note = Q9NR97
  source 1..129: mol_type = other RNA
agaacactattacaagcaagaaatttcgaaagaaataaagcaataaaagtaataatagcagtagtagtagtattcatagtatttcaattgccatataacggagtagtactagcacaaacagtagcatga

SEQ ID NO: 76947 - RNA, 189 nt, synthetic construct
  misc_feature 1..189: note = P16410
  source 1..189: mol_type = other RNA
tttttgttgtggatattggccgccgtctcgagcggcctcttcttctactcgttcttgttgaccgccgtcagcctctcgaagatgttgaaaaagcgctcgccgttgaccaccggcgtgtacgtcaagatgccgccgaccgaaccggagtgcgagaaacagttccaaccgtacttcatcccgataaactga

SEQ ID NO: 76948 - protein, 24 aa, synthetic construct
  REGION 1..24: note = P30443_1-18
MAVMAPRTLLLLLSGALALTQTWA

SEQ ID NO: 76949 - protein, 18 aa, synthetic construct
  REGION 1..18: note = Q6GPI1_1-18
MAFLWLLSCWALLGTTFG

SEQ ID NO: 76950 - protein, 18 aa, synthetic construct
  REGION 1..18: note = P02768_1-18
MKWVTFISLLFLFSSAYS

SEQ ID NO: 76951 - protein, 18 aa, synthetic construct
  REGION 1..18: note = AAB59424.1_1-18
MDWTWILFLVAAATRVHS

SEQ ID NO: 76952 - RNA, 72 nt, synthetic construct
  misc_feature 1..72: note = P30443_1-54
  source 1..72: mol_type = other RNA
atggccgtcatggcgccccgaaccctcctcctgctactctcgggggccctggccctgacccagacctgggcg

SEQ ID NO: 76953 - RNA, 54 nt, synthetic construct
  misc_feature 1..54: note = Q6GPI1_1-54
  source 1..54: mol_type = other RNA
atggctttcctctggctcctctcctgctgggccctcctgggtaccaccttcggc

SEQ ID NO: 76954 - RNA, 54 nt, synthetic construct
  misc_feature 1..54: note = P02768_1-54
  source 1..54: mol_type = other RNA
atgaagtgggtaacctttatttcccttctttttctctttagctcggcttattcc

SEQ ID NO: 76955 - RNA, 54 nt, synthetic construct
  misc_feature 1..54: note = AAB59424.1_1-54
  source 1..54: mol_type = other RNA
atggactggacctggatcctcttcttggtggcagcagccacgcgagtccactcc

SEQ ID NO: 76956 - RNA, 72 nt, synthetic construct
  misc_feature 1..72: note = P30443_1-54
  source 1..72: mol_type = other RNA
atggccgtgatggcgccccgcaccctgctcctgctgctcagcggcgccctggccctgacccagacgtgggcc

SEQ ID NO: 76957 - RNA, 54 nt, synthetic construct
  misc_feature 1..54: note = Q6GPI1_1-54
  source 1..54: mol_type = other RNA
atggccttcctgtggctcctgagctgctgggccctgctcggcaccaccttcggg

SEQ ID NO: 76958 - RNA, 54 nt, synthetic construct
  misc_feature 1..54: note = P02768_1-54
  source 1..54: mol_type = other RNA
atgaagtgggtgaccttcatcagcctcctgttcctgttctccagcgcctactcc

SEQ ID NO: 76959 - RNA, 54 nt, synthetic construct
  misc_feature 1..54: note = AAB59424.1_1-54
  source 1..54: mol_type = other RNA
atggactggacctggatcctgttcctcgtggccgccgcgacccgcgtccacagc

SEQ ID NO: 76960 - RNA, 72 nt, synthetic construct
  misc_feature 1..72: note = P30443_1-54
  source 1..72: mol_type = other RNA
atggccgtcatggccccccgcaccctcctcctcctcctctccggcgccctcgccctcacccagacctgggcc

SEQ ID NO: 76961 - RNA, 54 nt, synthetic construct
  misc_feature 1..54: note = Q6GPI1_1-54
  source 1..54: mol_type = other RNA
atggccttcctctggctcctctcctgctgggccctcctcggcaccaccttcggc

SEQ ID NO: 76962 - RNA, 54 nt, synthetic construct
  misc_feature 1..54: note = P02768_1-54
  source 1..54: mol_type = other RNA
atgaagtgggtcaccttcatctccctcctcttcctcttctcctccgcctactcc

SEQ ID NO: 76963 - RNA, 54 nt, synthetic construct
  misc_feature 1..54: note = AAB59424.1_1-54
  source 1..54: mol_type = other RNA
atggactggacctggatcctcttcctcgtcgccgccgccacccgcgtccactcc

SEQ ID NO: 76964 - RNA, 72 nt, synthetic construct
  misc_feature 1..72: note = P30443_1-54
  source 1..72: mol_type = other RNA
atggccgtgatggctcccagaaccctgctccttctgttgagcggcgcattagccctgacacagacttgggcg

SEQ ID NO: 76965 - RNA, 54 nt, synthetic construct
  misc_feature 1..54: note = Q6GPI1_1-54
  source 1..54: mol_type = other RNA
atggccttcctgtggctccttagctgctgggctctgttgggcaccacatttggg

SEQ ID NO: 76966 - RNA, 54 nt, synthetic construct
  misc_feature 1..54: note = P02768_1-54
  source 1..54: mol_type = other RNA
atgaagtgggtgaccttcatcagcctgctctttcttttctcctctgcctactca

SEQ ID NO: 76967 - RNA, 54 nt, synthetic construct
  misc_feature 1..54: note = AAB59424.1_1-54
  source 1..54: mol_type = other RNA
atggactggacctggatcctgttcctcgtggccgctgcaacaagagtccacagc

SEQ ID NO: 76968 - RNA, 72 nt, synthetic construct
  misc_feature 1..72: note = P30443_1-54
  source 1..72: mol_type = other RNA
atggccgtgatggcccccagaaccctgctgctgctgctgagcggcgccctggccctgacccagacctgggcc

SEQ ID NO: 76969 - RNA, 54 nt, synthetic construct
  misc_feature 1..54: note = Q6GPI1_1-54
  source 1..54: mol_type = other RNA
atggccttcctgtggctgctgagctgctgggccctgctgggcaccaccttcggc

SEQ ID NO: 76970 - RNA, 54 nt, synthetic construct
  misc_feature 1..54: note = P02768_1-54
  source 1..54: mol_type = other RNA
atgaagtgggtgaccttcatcagcctgctgttcctgttcagcagcgcctacagc

SEQ ID NO: 76971 - RNA, 54 nt, synthetic construct
  misc_feature 1..54: note = AAB59424.1_1-54
  source 1..54: mol_type = other RNA
atggactggacctggatcctgttcctggtggccgccgccaccagagtgcacagc

SEQ ID NO: 76972 - RNA, 72 nt, synthetic construct
  misc_feature 1..72: note = P30443_1-54
  source 1..72: mol_type = other RNA
atggccgtgatggctcccagaaccctgctcctgcttctgagcggcgccctcgcgctgacacagacgtgggct

SEQ ID NO: 76973 - RNA, 54 nt, synthetic construct
  misc_feature 1..54: note = Q6GPI1_1-54
  source 1..54: mol_type = other RNA
atggctttcctgtggctcctgagctgctgggcccttctgggcaccacatttggg

SEQ ID NO: 76974 - RNA, 54 nt, synthetic construct
  misc_feature 1..54: note = P02768_1-54
  source 1..54: mol_type = other RNA
atgaagtgggtgaccttcatcagcctgctctttctgttctcctctgcctacagc

SEQ ID NO: 76975 - RNA, 54 nt, synthetic construct
  misc_feature 1..54: note = AAB59424.1_1-54
  source 1..54: mol_type = other RNA
atggactggacctggatcctgttcctcgtggccgctgccacaagagtccacagc

SEQ ID NO: 76976 - RNA, 72 nt, synthetic construct
  misc_feature 1..72: note = P30443_1-54
  source 1..72: mol_type = other RNA
atggcagtaatggcaccaagaacactattactattactatcaggagcactagcactaacacaaacatgggca

SEQ ID NO: 76977 - RNA, 54 nt, synthetic construct
  misc_feature 1..54: note = Q6GPI1_1-54
  source 1..54: mol_type = other RNA
atggcatttttatggttattatcatgttgggctttattaggaactacatttgga

SEQ ID NO: 76978 - RNA, 54 nt, synthetic construct
  misc_feature 1..54: note = P02768_1-54
  source 1..54: mol_type = other RNA
atgaaatgggttacttttatttctcttctttttcttttttcttctgcttactct

SEQ ID NO: 76979 - RNA, 54 nt, synthetic construct
  misc_feature 1..54: note = AAB59424.1_1-54
  source 1..54: mol_type = other RNA
atggactggacatggatattatttttagtagcagcagcaacaagagtacattca

SEQ ID NO: 76980 - RNA, 72 nt, synthetic construct
  misc_feature 1..72: note = P30443_1-54
  source 1..72: mol_type = other RNA
atggccgtgatggcacccaggaccctgctcctgttgctgagcggcgccctcgcgctgactcagacctgggcc

SEQ ID NO: 76981 - RNA, 54 nt, synthetic construct
  misc_feature 1..54: note = Q6GPI1_1-54
  source 1..54: mol_type = other RNA
atggccttcctgtggctcctgagctgctgggcattgctgggcaccacttttggg

SEQ ID NO: 76982 - RNA, 54 nt, synthetic construct
  misc_feature 1..54: note = P02768_1-54
  source 1..54: mol_type = other RNA
atgaagtgggtgaccttcatcagcctgctctttctgttctccagtgcctacagc

SEQ ID NO: 76983 - RNA, 54 nt, synthetic construct
  misc_feature 1..54: note = AAB59424.1_1-54
  source 1..54: mol_type = other RNA
atggactggacctggatcctgttcctcgtggccgcagccactagggtccacagc

SEQ ID NO: 76984 - RNA, 72 nt, synthetic construct
  misc_feature 1..72: note = P30443_1-54
  source 1..72: mol_type = other RNA
atggcggtcatggccccgcgcacgctcttgctcttgctctcgggcgcactagcgctaacgcaaacgtgggcg

SEQ ID NO: 76985 - RNA, 54 nt, synthetic construct
  misc_feature 1..54: note = Q6GPI1_1-54
  source 1..54: mol_type = other RNA
atggccttcctctggctcctttcctgctgggccctccttggcactactttcggc

SEQ ID NO: 76986 - RNA, 54 nt, synthetic construct
  misc_feature 1..54: note = P02768_1-54
  source 1..54: mol_type = other RNA
atgaaatgggtcaccttcatctccctcctcttcctcttctcctctgcctactcc

SEQ ID NO: 76987 - RNA, 54 nt, synthetic construct
  misc_feature 1..54: note = AAB59424.1_1-54
  source 1..54: mol_type = other RNA
atggactggacctggatactcttcctcgtcgctgccgctacccgcgtccactca

SEQ ID NO: 76988 - RNA, 72 nt, synthetic construct
  misc_feature 1..72: note = P30443_1-54
  source 1..72: mol_type = other RNA
atggcggtcatggccccgcgcacgctcttgctattgctctcgggcgcgctcgcgctcacgcaaacgtgggcg

SEQ ID NO: 76989 - RNA, 54 nt, synthetic construct
  misc_feature 1..54: note = Q6GPI1_1-54
  source 1..54: mol_type = other RNA
atggcgttcttgtggttgctctcgtgctgggccttgcttgggaccacgttcggg

SEQ ID NO: 76990 - RNA, 54 nt, synthetic construct
  misc_feature 1..54: note = P02768_1-54
  source 1..54: mol_type = other RNA
atgaaatgggtcactttcatctccctcctcttcctcttctcctccgcctactcc

SEQ ID NO: 76991 - RNA, 54 nt, synthetic construct
  misc_feature 1..54: note = AAB59424.1_1-54
  source 1..54: mol_type = other RNA
atggattggacgtggatactctttctcgtggccgcggccacgcgcgtgcactcg

SEQ ID NO: 76992 - RNA, 72 nt, synthetic construct
  misc_feature 1..72: note = P30443_1-54
  source 1..72: mol_type = other RNA
atggccgtcatggccccccgcaccctcctcctcctcctctccggcgccctcgccctcacccaaacctgggcc

SEQ ID NO: 76993 - RNA, 54 nt, synthetic construct; identical to SEQ ID NO: 76961
  misc_feature 1..54: note = Q6GPI1_1-54
  source 1..54: mol_type = other RNA

SEQ ID NO: 76994 - RNA, 54 nt, synthetic construct
  misc_feature 1..54: note = P02768_1-54
  source 1..54: mol_type = other RNA
atgaaatgggtcaccttcatctccctcctcttcctcttctcctccgcctactcc

SEQ ID NO: 76995 - RNA, 54 nt, synthetic construct
  misc_feature 1..54: note = AAB59424.1_1-54
  source 1..54: mol_type = other RNA
atggactggacctggatactcttcctcgtcgccgccgccacccgcgtccactca

SEQ ID NO: 76996 - RNA, 72 nt, synthetic construct; identical to SEQ ID NO: 76976
  misc_feature 1..72: note = P30443_1-54
  source 1..72: mol_type = other RNA

SEQ ID NO: 76997 - RNA, 54 nt, synthetic construct
  misc_feature 1..54: note = Q6GPI1_1-54
  source 1..54: mol_type = other RNA
atggcttttttatggttattatcttgttgggctttattaggtactacttttggt

SEQ ID NO: 76998 - RNA, 54 nt, synthetic construct; identical to SEQ ID NO: 76978
  misc_feature 1..54: note = P02768_1-54
  source 1..54: mol_type = other RNA

SEQ ID NO: 76999 - RNA, 54 nt, synthetic construct; identical to SEQ ID NO: 76979
  misc_feature 1..54: note = AAB59424.1_1-54
  source 1..54: mol_type = other RNA

SEQ ID NO: 77000 - RNA, 72 nt, synthetic construct; identical to SEQ ID NO: 76976
  misc_feature 1..72: note = P30443_1-54
  source 1..72: mol_type = other RNA

SEQ ID NO: 77001 - RNA, 54 nt, synthetic construct; identical to SEQ ID NO: 76977
  misc_feature 1..54: note = Q6GPI1_1-54
  source 1..54: mol_type = other RNA

SEQ ID NO: 77002 - RNA, 54 nt, synthetic construct; identical to SEQ ID NO: 76978
  misc_feature 1..54: note = P02768_1-54
  source 1..54: mol_type = other RNA

SEQ ID NO: 77003 - RNA, 54 nt, synthetic construct; identical to SEQ ID NO: 76979
  misc_feature 1..54: note = AAB59424.1_1-54
  source 1..54: mol_type = other RNA

SEQ ID NO: 77004 - RNA, 189 nt, synthetic construct
  misc_feature 1..189: note = HsCTLA4(162-223)1
  source 1..189: mol_type = other RNA
ttcctgctgtggatcctggccgccgtgtcctccggcctcttcttctactccttcctcctcacggcggtgagcctgagcaagatgctgaagaagcgcagccccctgaccaccggggtgtacgtcaagatgccgcccaccgagcccgagtgcgagaagcagttccagccctacttcatcccgatcaactga

SEQ ID NO: 77005 - RNA, 189 nt, synthetic construct
  misc_feature 1..189: note = HsCTLA4(162-223)2
  source 1..189: mol_type = other RNA
ttcctcctgtggatcctcgccgccgtgagcagcgggctgttcttctacagcttcctgctgaccgcggtctccctgtccaagatgctcaagaagcgctcccccctgaccaccggcgtgtacgtgaagatgccgcccacggagcccgagtgcgagaagcagttccagccctacttcatcccgatcaactga

SEQ ID NO: 77006 - RNA, 189 nt, synthetic construct
  misc_feature 1..189: note = HsCTLA4(162-223)3
  source 1..189: mol_type = other RNA
ttcctcctgtggatcctggccgccgtctcctccgggctgttcttctactccttcctcctcacggcggtgagcctgagcaagatgctgaagaagcgcagccccctgaccaccggcgtgtacgtgaagatgccgcccaccgagccggagtgcgagaagcagttccagccctacttcatccccatcaactga

SEQ ID NO: 77007 - RNA, 189 nt, synthetic construct
  misc_feature 1..189: note = HsCTLA4(162-223)4
  source 1..189: mol_type = other RNA
ttcctcctctggatcctcgccgcggtgtcctccgggctgttcttctacagcttcctgctgaccgccgtcagcctgtccaagatgctgaagaagcgcagccccctgacgaccggcgtgtacgtgaagatgccccccaccgagccggagtgcgagaagcagttccagccctacttcatcccgatcaactga

SEQ ID NO: 77008 - RNA, 189 nt, synthetic construct
  misc_feature 1..189: note = HsCTLA4(162-223)5
  source 1..189: mol_type = other RNA
ttcctcctctggatcctcgccgccgtgtcctccgggctgttcttctacagcttcctgctgaccgcggtcagcctgtccaagatgctgaagaagcgcagccccctgacgaccggcgtgtacgtgaagatgccccccaccgagccggagtgcgagaagcagttccagccctacttcatcccgatcaactga

SEQ ID NO: 77009 - RNA, 189 nt, synthetic construct
  misc_feature 1..189: note = HsCTLA4(162-223)6
  source 1..189: mol_type = other RNA
ttcctcctgtggatcctcgccgccgtgagcagcgggctgttcttctacagcttcctgctgaccgcggtctccctctccaagatgctgaagaagcgctcccccctgaccaccggcgtgtacgtgaagatgccgcccacggagcccgagtgcgagaagcagttccagccctacttcatcccgatcaactga

SEQ ID NO: 77010 - RNA, 189 nt, synthetic construct
  misc_feature 1..189: note = HsCTLA4(162-223)7
  source 1..189: mol_type = other RNA
ttcctcctgtggatcctcgccgccgtctcctccggcctcttcttctacagcttcctgctgaccgcggtgagcctgagcaagatgctgaagaagcgctcccccctgaccaccggggtgtacgtgaagatgccgcccacggagcccgagtgcgagaagcagttccagccctacttcatcccgatcaactga

SEQ ID NO: 77011 - RNA, 189 nt, synthetic construct
  misc_feature 1..189: note = HsCTLA4(162-223)8
  source 1..189: mol_type = other RNA
ttcctgctgtggatcctggccgccgtcagcagcgggctcttcttctactccttcctcctcacggcggtgtccctgagcaagatgctgaagaagcgctcccccctgaccaccggcgtgtacgtgaagatgccgcccaccgagcccgagtgcgagaagcagttccagccctacttcatcccgatcaactga

SEQ ID NO: 77012 - RNA, 189 nt, synthetic construct
  misc_feature 1..189: note = HsCTLA4(162-223)9
  source 1..189: mol_type = other RNA
ttcctcctgtggatcctcgccgcggtgagctccgggctgttcttctacagcttcctgctgaccgccgtgagcctgtccaagatgctcaagaagcgctcccccctgaccaccggcgtctacgtgaagatgccgcccacggagcccgagtgcgagaagcagttccagccctacttcatcccgatcaactga

SEQ ID NO: 77013 - RNA, 189 nt, synthetic construct
  misc_feature 1..189: note = HsCTLA4(162-223)10
  source 1..189: mol_type = other RNA
ttcctcctgtggatcctggccgccgtgagcagcgggctgttcttctacagcttcctgctgaccgcggtctccctctccaagatgctcaagaagcgctcccccctgaccaccggcgtgtacgtgaagatgccgcccacggagcccgagtgcgagaagcagttccagccctacttcatcccgatcaactga

SEQ ID NO: 77014 - RNA, 189 nt, synthetic construct
  misc_feature 1..189: note = HsCTLA4(162-223)11
  source 1..189: mol_type = other RNA
ttcctcctctggatcctggccgcggtgagctccgggctgttcttctacagcttcctgctgaccgccgtgagcctctccaagatgctgaagaagcgctcccccctgaccaccggcgtctacgtgaagatgccgcccacggagcccgagtgcgagaagcagttccagccctacttcatcccgatcaactga

SEQ ID NO: 77015 - RNA, 189 nt, synthetic construct
  misc_feature 1..189: note = HsCTLA4(162-223)12
  source 1..189: mol_type = other RNA
ttcctcctgtggatcctcgccgcggtgagctccgggctgttcttctacagcttcctgctgaccgccgtctccctcagcaagatgctgaagaagcgctcccccctgaccaccggcgtgtacgtgaagatgccgcccacggagcccgagtgcgagaagcagttccagccctacttcatcccgatcaactga

SEQ ID NO: 77016 - RNA, 189 nt, synthetic construct
  misc_feature 1..189: note = HsCTLA4(162-223)13
  source 1..189: mol_type = other RNA
ttcctcctctggatcctcgccgccgtctcctccgggctgttcttctacagcttcctgctgaccgcggtgagcctgagcaagatgctgaagaagcgctcccccctgaccaccggcgtgtacgtgaagatgccccccacggagcccgagtgcgagaagcagttccagccgtacttcatcccgatcaactga

SEQ ID NO: 77017 - RNA, 189 nt, synthetic construct
  misc_feature 1..189: note = HsCTLA4(162-223)14
  source 1..189: mol_type = other RNA
ttcctcctgtggatcctggccgccgtctcctccgggctcttcttctactccttcctcctgaccgcggtgagcctgagcaagatgctgaagaagcgcagccccctgaccaccggcgtgtacgtgaagatgccccccacggagccggagtgcgagaagcagttccagccctacttcatcccgatcaactga

SEQ ID NO: 77018-77023 - skipped (6 entries)

SEQ ID NO: 77024 - protein, 4 aa, synthetic construct
  REGION 1..4: note = Linker 26
GGGS

SEQ ID NO: 77025 - protein, 4 aa, synthetic construct
  REGION 1..4: note = Linker 27
SGGG

SEQ ID NO: 77026 - protein, 7 aa, synthetic construct
  REGION 1..7: note = Linker 28
GGGGSGS

SEQ ID NO: 77027 - protein, 8 aa, synthetic construct
  REGION 1..8: note = Linker 29
GGGGSGGS

SEQ ID NO: 77028 - protein, 10 aa, synthetic construct
  REGION 1..10: note = Linker 30
GGGGSGGGGS

SEQ ID NO: 77029 - protein, 15 aa, synthetic construct
  REGION 1..15: note = Linker 31
GGGGSGGGGSGGGGS

SEQ ID NO: 77030 - protein, 16 aa, synthetic construct
  REGION 1..16: note = Linker 32
AKTTPKLEEGEFSEAR

SEQ ID NO: 77031 - protein, 17 aa, synthetic construct
  REGION 1..17: note = Linker 33
AKTTPKLEEGEFSEARV

SEQ ID NO: 77032 - protein, 9 aa, synthetic construct
  REGION 1..9: note = Linker 34
AKTTPKLGG

SEQ ID NO: 77033 - protein, 10 aa, synthetic construct
  REGION 1..10: note = Linker 35
SAKTTPKLGG

SEQ ID NO: 77034 - protein, 17 aa, synthetic construct
  REGION 1..17: note = Linker 36
AKTTPKLEEGEFSEARV

SEQ ID NO: 77035 - protein, 6 aa, synthetic construct
  REGION 1..6: note = Linker 37
SAKTTP

SEQ ID NO: 77036 - protein, 10 aa, synthetic construct
  REGION 1..10: note = Linker 38
SAKTTPKLGG

SEQ ID NO: 77037 - protein, 6 aa, synthetic construct
  REGION 1..6: note = Linker 39
RADAAP

SEQ ID NO: 77038 - protein, 9 aa, synthetic construct
  REGION 1..9: note = Linker 40
RADAAPTVS

SEQ ID NO: 77039 - protein, 12 aa, synthetic construct
  REGION 1..12: note = Linker 41
RADAAAAGGPGS

SEQ ID NO: 77040 - protein, 27 aa, synthetic construct
  REGION 1..27: note = Linker 42
RADAAAAGGGGSGGGGSGGGGSGGGGS

SEQ ID NO: 77041 - protein, 6 aa, synthetic construct
  REGION 1..6: note = Linker 43
SAKTTP

SEQ ID NO: 77042 - protein, 10 aa, synthetic construct
  REGION 1..10: note = Linker 44
SAKTTPKLGG

SEQ ID NO: 77043 - protein, 18 aa, synthetic construct
  REGION 1..18: note = Linker 45
SAKTTPKLEEGEFSEARV

SEQ ID NO: 77044 - protein, 5 aa, synthetic construct
  REGION 1..5: note = Linker 46
ADAAP

SEQ ID NO: 77045 - protein, 12 aa, synthetic construct
  REGION 1..12: note = Linker 47
ADAAPTVSIFPP

SEQ ID NO: 77046 - protein, 5 aa, synthetic construct
  REGION 1..5: note = Linker 48
TVAAP

SEQ ID NO: 77047 - protein, 12 aa, synthetic construct
  REGION 1..12: note = Linker 49
TVAAPSVFIFPP

SEQ ID NO: 77048 - protein, 6 aa, synthetic construct
  REGION 1..6: note = Linker 50
QPKAAP

SEQ ID NO: 77049 - protein, 13 aa, synthetic construct
  REGION 1..13: note = Linker 51
QPKAAPSVTLFPP

SEQ ID NO: 77050 - protein, 6 aa, synthetic construct
  REGION 1..6: note = Linker 52
AKTTPP

SEQ ID NO: 77051 - protein, 13 aa, synthetic construct
  REGION 1..13: note = Linker 53
AKTTPPSVTPLAP

SEQ ID NO: 77052 - protein, 6 aa, synthetic construct
  REGION 1..6: note = Linker 54
AKTTAP

SEQ ID NO: 77053 - protein, 13 aa, synthetic construct
  REGION 1..13: note = Linker 55
AKTTAPSVYPLAP

SEQ ID NO: 77054 - protein, 6 aa, synthetic construct
  REGION 1..6: note = Linker 56
ASTKGP

SEQ ID NO: 77055 - protein, 13 aa, synthetic construct
  REGION 1..13: note = Linker 57
ASTKGPSVFPLAP

SEQ ID NO: 77056 - protein, 15 aa, synthetic construct
  REGION 1..15: note = Linker 58
GENKVEYAPALMALS

SEQ ID NO: 77057 - protein, 15 aa, synthetic construct
  REGION 1..15: note = Linker 59
GPAKELTPLKEAKVS

SEQ ID NO: 77058 - protein, 15 aa, synthetic construct
  REGION 1..15: note = Linker 60
GHEAAAVMQVQYPAS

SEQ ID NO: 77059 - RNA, 45 nt, synthetic construct
  misc_feature 1..45: note = CV Linker (G4S)3(GA1)
  source 1..45: mol_type = other RNA
ggcggaggcggatctggtggcggaggaagtggtggcggcggatct

SEQ ID NO: 77060 - RNA, 45 nt, synthetic construct
  misc_feature 1..45: note = CV Linker (G4S)3(GA2)
  source 1..45: mol_type = other RNA
ggcggcggaggatcaggcggtggtggaagcggaggtggtggatct

SEQ ID NO: 77061 - RNA, 45 nt, synthetic construct
  misc_feature 1..45: note = CV Linker (G4S)3(GA3)
  source 1..45: mol_type = other RNA
ggtggtggtggttcaggcggcggtggttctggcggtggcggctct

SEQ ID NO: 77062 - RNA, 560 nt, synthetic construct
  misc_feature 1..560: note HsCTLA4(1-35)(GC)_Linker-(GGGGS)3-V2(GC)_GgOva(249-273)(GC) _Linke r-(GGGGS)3-V3(GC)_PADRE(GC)_Linker-(GGGGS)3(GC)_HsCTLA4(162 -223)( GC)
  source 1..560: mol_type = other RNA
aagcttaccatggcctgcctgggcttccagcgccacaaggcccagctcaacctggcgacccggacctggccctgcacgctgctcttcttcctgctgttcatccccgtgttctgcgggggcgggggcagcgggggcggcgggtccggcgggggcgggagcgaggtcagcggcctcgagcagctggagtcgatcatcaacttcgagaagctgaccgagtggaccagcagcaacgtgggcgggggcgggtccggcggcgggggcagcgggggcgggggctccgccaagttcgtggccgcctggaccctgaaggcggccgccggcgggggcgggagcggcgggggcggctccgggggcgggggcagcttcctcctgtggatcctggccgccgtctccagcggcctcttcttctactccttcctgctgaccgcggtgagcctctccaagatgctgaagaagcgcagccccctgacgaccggggtgtacgtcaagatgccgcccaccgagcccgagtgcgagaagcagttccagccctacttcatccccatcaactgaggactagt

SEQ ID NO: 77063 - protein, 180 aa, synthetic construct
  REGION 1..180: note HsCTLA4(1-35)(GC)_Linker-(GGGGS)3-V2(GC)_GgOva(249-273)(GC) _Linke r-(GGGGS)3-V3(GC)_PADRE(GC)_Linker-(GGGGS)3(GC)_HsCTLA4(162 -223)( GC)
MACLGFQRHKAQLNLATRTWPCTLLFFLLFIPVFCGGGGSGGGGSGGGGSEVSGLEQLESIINFEKLTEWTSSNVGGGGSGGGGSGGGGSAKFVAAWTLKAAAGGGGSGGGGSGGGGSFLLWILAAVSSGLFFYSFLLTAVSLSKMLKKRSPLTTGVYVKMPPTEPECEKQFQPYFIPIN

SEQ ID NO: 77064 - RNA, 75 nt, synthetic construct
  misc_feature 1..75: note = Ova epitope (249-273)
  source 1..75: mol_type = other RNA
gaggtcagcggcctcgagcagctggagtcgatcatcaacttcgagaagctgaccgagtggaccagcagcaacgtg

SEQ ID NO: 77065 - protein, 25 aa, synthetic construct
  REGION 1..25: note = Ova epitope (249-273)
EVSGLEQLESIINFEKLTEWTSSNV

SEQ ID NO: 77066 - RNA, 189 nt, synthetic construct
  misc_feature 1..189: note = HsCTLA4(162-223)opt1
  source 1..189: mol_type = other RNA
ttcctgctctggatcctggccgccgtgagctccggcctgttcttctacagcttcctcctgaccgcggtctccctgagcaagatgctcaagaagcgctcccccctgaccacgggggtgtacgtgaagatgccgcccaccgagcccgagtgcgagaagcagttccagccctacttcatcccgatcaactga
